(19) United States
(12) Patent Application Publication
(10) Pub. No.: US 2022/0356469 A1
(43) Pub. Date: Nov. 10, 2022

(54) METHODS AND COMPOSITIONS FOR EDITING NUCLEOTIDE SEQUENCES METHODS AND COMPOSITIONS FOR EDITING NUCLEOTIDE SEQUENCES

(71) Applicants: The Broad Institute, Inc., Cambridge, MA (US); President and Fellows of College, Cambridge, MA (US)

(72) Inventors: David R. Liu, Cambridge, MA (US); Andrew Vito Anzalone, Cambridge, MA (US); James William Nelson, Cambridge, MA (US)

(73) Assignees: The Broad Institute, Inc., Cambridge, MA (US); President and Fellows of Harvard College, Cambridge, MA (US)

(21) Appl. No.: 17/219,635

(22) Filed: Mar. 31, 2021

Related U.S. Application Data
(63) Continuation of application No. PCT/US2020/023730, filed on Mar. 19, 2020.
(60) Provisional application No. 63/100,548, filed on Mar. 17, 2020.
(60) Provisional application No. 62/991,069, filed on Mar. 17, 2020.
(60) Provisional application No. 62/944,231, filed on Dec. 5, 2019.
(60) Provisional application No. 62/974,537, filed on Dec. 5, 2019.
(60) Provisional application No. 62/931,195, filed on Nov. 5, 2019.
(60) Provisional application No. 62/913,553, filed on Oct. 10, 2019.
(60) Provisional application No. 62/973,558, filed on Oct. 10, 2019.
(60) Provisional application No. 62/889,996, filed on Aug. 21, 2019.
(60) Provisional application No. 62/922,654, filed on Aug. 21, 2019.
(60) Provisional application No. 62/858,958, filed on Jun. 7, 2019.
(60) Provisional application No. 62/820,813, filed on Mar. 19, 2019.

(51) Int. Cl. C12N 15/11

(52) U.S. Cl. CPC C12N 15/11; C12N 2310/3519; C12N 2310/20

(57) ABSTRACT

The present disclosure provides compositions and methods for conducting prime editing of a target DNA molecule (e.g., a genome) that enables the incorporation of a nucleotide change and/or targeted mutagenesis. The nucleotide change can include a single-nucleotide change (e.g., any transition or any transversion), an insertion of one or more nucleotides, or a deletion of one or more nucleotides. More in particular, the disclosure provides fusion proteins comprising nucleic acid programmable DNA binding proteins (napDNAbp) and a polymerase (e.g., reverse transcriptase), which is guided to a specific DNA sequence by a modified guide RNA, named an PEgRNA. The PEgRNA has been altered (relative to a standard guide RNA) to comprise an extended portion that provides a DNA synthesis template sequence which encodes a single strand DNA flap, which is homologous to a strand of the targeted endogenous DNA sequence to be edited, but which contains the desired one or more nucleotide changes and which, following synthesis by the polymerase (e.g., reverse transcriptase), becomes incorporated into the target DNA molecule. Also disclosed herein are various methods that leverage prime editing, including treating trinucleotide repeat contraction diseases, installing targeted peptide tags, treating prion disease through the installation of protection mutations, manipulating RNA-encoding genes for the installation of RNA tags for controlling the function and expression of RNA, using prime editing to construct sophisticated gene libraries, using prime editing to insert immunoepitopes into proteins, use of prime editing to insert inducible dimerization domains into protein targets, and delivery methods, among others.

### RELATED APPLICATIONS AND INCORPORATION BY REFERENCE

[0001] This application claims priority under 35 U.S.C. §§ 120 and 365(c) to and is a continuation of International PCT Application PCT/US2020/023730, filed Mar. 19, 2020, which claims priority under 35 U.S.C. § 119(e) to U.S. Provisional Application No. 62/820,813, filed Mar. 19, 2019 (Attorney Docket No. B1195.70074US00), U.S. Provisional Application No. 62/858,958 (Attorney Docket No. B1195.70074US01), filed Jun. 7, 2019, U.S. Provisional Application No. 62/889,996 (Attorney Docket No. B1195.70074US02), filed Aug. 21, 2019, U.S. Provisional Application No. 62/922,654, filed Aug. 21, 2019 (Attorney Docket No. B1195.70083US00), U.S. Provisional Application No. 62/913,553 (Attorney Docket No. B1195.70074US03), filed Oct. 10, 2019, U.S. Provisional Application No. 62/973,558 (Attorney Docket No. B1195.70083US01), filed Oct. 10, 2019, U.S. Provisional Application No. 62/931,195 (Attorney Docket No. B1195.70074US04), filed Nov. 5, 2019, U.S. Provisional Application No. 62/944,231 (Attorney Docket No. B1195.70074US05), filed Dec. 5, 2019, U.S. Provisional Application No. 62/974,537 (Attorney Docket No. B1195.70083US02), filed Dec. 5, 2019, U.S. Provisional Application No. 62/991,069 (Attorney Docket No. B1195.70074US06), filed Mar. 17, 2020, and U.S. Provisional Application No. 63/100,548 (Attorney Docket No. B1195.70083US03), filed Mar. 17, 2020, the entire contents of each of which is incorporated herein by reference.

### GOVERNMENT SUPPORT

[0002] This invention was made with government support under grant numbers U01AI142756, RM1HG009490, R01EB022376, and R35GM118062 awarded by the National Institutes of Health. The government has certain rights in the invention.

### REFERENCE TO A SEQUENCE LISTING SUBMITTED AS A TEXT FILE VIA EFS-WEB

[0003] This application contains a Sequence Listing which has been submitted in ASCII format via EFS-Web and is hereby incorporated by reference in its entirety. Said ASCII copy, created on Apr. 28, 2021, is named B119570096US00-SUBSEQ-GJM and is 2,821 kilobytes in size.

### BACKGROUND OF THE INVENTION

[0004] Pathogenic single nucleotide mutations contribute to approximately 50% of human diseases for which there is a genetic component,⁷ according to some estimates. Unfortunately, treatment options for patients with these genetic disorders remain extremely limited, despite decades of gene therapy exploration⁸. Perhaps the most parsimonious solution to this therapeutic challenge is direct correction of single nucleotide mutations in patient genomes, which would address the root cause of disease and would likely provide lasting benefit. Although such a strategy was previously unthinkable, recent improvements in genome editing capabilities brought about by the advent of the CRISPR/Cas system⁹ have now brought this therapeutic approach within reach. By straightforward design of a guide RNA (gRNA) sequence that contains ˜20 nucleotides complementary to the target DNA sequence, nearly any conceivable genomic site can be specifically accessed by CRISPR associated (Cas) nucleases^{1,2}. To date, several monomeric bacterial Cas nuclease systems have been identified and adapted for genome editing applications¹⁰. This natural diversity of Cas nucleases, along with a growing collection of engineered variants¹¹⁻¹⁴, offers fertile ground for developing new genome editing technologies.

[0005] While gene disruption with CRISPR is now a mature technique, precision editing of single base pairs in the human genome remains a major challenge³. Homology directed repair (HDR) has long been used in human cells and other organisms to insert, correct, or exchange DNA sequences at sites of double strand breaks (DSBs) using donor DNA repair templates that encode the desired edits¹⁵. However, traditional HDR has very low efficiency in most human cell types, particularly in non-dividing cells, and competing non-homologous end joining (NHEJ) leads predominantly to insertion-deletion (indel) byproducts¹⁶. Other issues relate to the generation of DSBs, which can give rise to large chromosomal rearrangements and deletions at target loci¹⁷, or activate the p53 axis leading to growth arrest and apoptosis^{18, 19}.

[0006] Several approaches have been explored to address these drawbacks of HDR. For example, repair of single-stranded DNA breaks (nicks) with oligonucleotide donors has been shown to reduce indel formation, but yields of desired repair products remain low²⁰. Other strategies attempt to bias repair toward HDR over NHEJ using small molecule and biologic reagents²¹⁻²³. However, the effectiveness of these methods is likely cell-type dependent, and perturbation of the normal cell state could lead to undesirable and unforeseeable effects.

[0007] Recently, the inventors, led by Prof. David Liu et al., developed base editing as a technology that edits target nucleotides without creating DSBs or relying on HDR^{4-6,24-27}. Direct modification of DNA bases by Cas-fused deaminase enzymes allows for C⋅G to T⋅A, or A⋅T to G⋅C, base pair conversions in a short target window (˜5-7 bases) with very high efficiency. As a result, base editors have been rapidly adopted by the scientific community. However, the following factors limit their generality for precision genome editing: (1) “bystander editing” of non-target C or A bases within the target window are observed; (2) target nucleotide product mixtures are observed; (3) target bases must be located 15±2 nucleotides upstream of a PAM sequence; and (5) repair of small insertion and deletion mutations is not possible.

[0008] Therefore, the development of programmable editors that are flexibly capable of introducing any desired single nucleotide change and/or which could install base pair insertions or deletions (e.g., at least 1, 2, 3, 4, 5, 6, 8, 9, 10, 11, 12, 13, 14, 15, 16, 17, 18, 19, 20, 30, 40, 50, 60, 70, 80, 90, 100, or more base pair insertions or deletions) and/or which could alter or modify the nucleotide sequence at a target site with high specificity and efficiency would substantially expand the scope and therapeutic potential of genome editing technologies based on CRISPR.

### SUMMARY OF THE INVENTION

[0009] The present invention describes an entirely new platform for genome editing called “prime editing.” Prime editing is a versatile and precise genome editing method that directly writes new genetic information into a specified DNA site using a nucleic acid programmable DNA binding protein (“napDNAbp”) working in association with a polymerase (i.e., in the form of a fusion protein or otherwise provided in trans with the napDNAbp), wherein the prime editing system is programmed with a prime editing (PE) guide RNA (“PEgRNA”) that both specifies the target site and templates the synthesis of the desired edit in the form of a replacement DNA strand by way of an extension (either DNA or RNA) engineered onto a guide RNA (e.g., at the 5′ or 3′ end, or at an internal portion of a guide RNA). The replacement strand containing the desired edit (e.g., a single nucleobase substitution) shares the same sequence as the endogenous strand of the target site to be edited (with the exception that it includes the desired edit). Through DNA repair and/or replication machinery, the endogenous strand of the target site is replaced by the newly synthesized replacement strand containing the desired edit. In some cases, prime editing may be thought of as a “search-and-replace” genome editing technology since the prime editors, as described herein, not only search and locate the desired target site to be edited, but at the same time, encode a replacement strand containing a desired edit which is installed in place of the corresponding target site endogenous DNA strand.

[0010] The prime editors of the present disclosure relate, in part, to the discovery that the mechanism of target-primed reverse transcription (TPRT) or “prime editing” can be leveraged or adapted for conducting precision CRISPR/Cas-based genome editing with high efficiency and genetic flexibility (e.g., as depicted in various embodiments of FIGS. 1A-1F). TPRT is naturally used by mobile DNA elements, such as mammalian non-LTR retrotransposons and bacterial Group II introns^{28,29}. The inventors have herein used Cas protein-reverse transcriptase fusions or related systems to target a specific DNA sequence with a guide RNA, generate a single strand nick at the target site, and use the nicked DNA as a primer for reverse transcription of an engineered reverse transcriptase template that is integrated with the guide RNA. However, while the concept begins with prime editors that use reverse transcriptases as the DNA polymerase component, the prime editors described herein are not limited to reverse transcriptases but may include the use of virtually and DNA polymerase. Indeed, while the application throughout may refer to prime editors with “reverse transcriptases,” it is set forth here that reverse transcriptases are only one type of DNA polymerase that may work with prime editing. Thus, wherever the specification mentions “reverse transcriptases,” the person having ordinary skill in the art should appreciate that any suitable DNA polymerase may be used in place of the reverse transcriptase. Thus, in one aspect, the prime editors may comprise Cas9 (or an equivalent napDNAbp) which is programmed to target a DNA sequence by associating it with a specialized guide RNA (i.e., PEgRNA) containing a spacer sequence that anneals to a complementary protospacer in the target DNA. The specialized guide RNA also contains new genetic information in the form of an extension that encodes a replacement strand of DNA containing a desired genetic alteration which is used to replace a corresponding endogenous DNA strand at the target site. To transfer information from the PEgRNA to the target DNA, the mechanism of prime editing involves nicking the target site in one strand of the DNA to expose a 3′-hydroxyl group. The exposed 3′-hydroxyl group can then be used to prime the DNA polymerization of the edit-encoding extension on PEgRNA directly into the target site. In various embodiments, the extension-which provides the template for polymerization of the replacement strand containing the edit—can be formed from RNA or DNA. In the case of an RNA extension, the polymerase of the prime editor can be an RNA-dependent DNA polymerase (such as, a reverse transcriptase). In the case of a DNA extension, the polymerase of the prime editor may be a DNA-dependent DNA polymerase.

[0011] The newly synthesized strand (i.e., the replacement DNA strand containing the desired edit) that is formed by the herein disclosed prime editors would be homologous to the genomic target sequence (i.e., have the same sequence as) except for the inclusion of a desired nucleotide change (e.g., a single nucleotide change, a deletion, or an insertion, or a combination thereof). The newly synthesized (or replacement) strand of DNA may also be referred to as a single strand DNA flap, which would compete for hybridization with the complementary homologous endogenous DNA strand, thereby displacing the corresponding endogenous strand. In certain embodiments, the system can be combined with the use of an error-prone reverse transcriptase enzyme (e.g., provided as a fusion protein with the Cas9 domain, or provided in trans to the Cas9 domain). The error-prone reverse transcriptase enzyme can introduce alterations during synthesis of the single strand DNA flap. Thus, in certain embodiments, error-prone reverse transcriptase can be utilized to introduce nucleotide changes to the target DNA. Depending on the error-prone reverse transcriptase that is used with the system, the changes can be random or non-random.

[0012] Resolution of the hybridized intermediate (comprising the single strand DNA flap synthesized by the reverse transcriptase hybridized to the endogenous DNA strand) can include removal of the resulting displaced flap of endogenous DNA (e.g., with a 5′ end DNA flap endonuclease, FEN1), ligation of the synthesized single strand DNA flap to the target DNA, and assimilation of the desired nucleotide change as a result of cellular DNA repair and/or replication processes. Because templated DNA synthesis offers single nucleotide precision for the modification of any nucleotide, including insertions and deletions, the scope of this approach is very broad and could foreseeably be used for myriad applications in basic science and therapeutics.

[0013] In one aspect, the specification provides a fusion protein comprising a nucleic acid programmable DNA binding protein (napDNAbp) and a reverse transcriptase. In various embodiments, the fusion protein is capable of carrying out genome editing by target-primed reverse transcription in the presence of an extended guide RNA.

[0014] In certain embodiments, the napDNAbp has a nickase activity. The napDNAbp may also be a Cas9 protein or functional equivalent thereof, such as a nuclease active Cas9, a nuclease inactive Cas9 (dCas9), or a Cas9 nickase (nCas9).

[0015] In certain embodiments, the napDNAbp is selected from the group consisting of: Cas9, Cas12e, Cas12d, Cas12a, Cas12b1, Cas13a, Cas12c, and Argonaute and optionally has a nickase activity.

[0016] In other embodiments, the fusion protein when complexed with an extended guide RNA is capable of binding to a target DNA sequence.

[0017] In still other embodiments, the target DNA sequence comprises a target strand and a complementary non-target strand.

[0018] In other embodiments, the binding of the fusion protein complexed to the extended guide RNA forms an R-loop. The R-loop can comprise (i) an RNA-DNA hybrid comprising the extended guide RNA and the target strand, and (ii) the complementary non-target strand.

[0019] In still other embodiments, the complementary non-target strand is nicked to form a reverse transcriptase priming sequence having a free 3′ end.

[0020] In various embodiments, the extended guide RNA comprises (a) a guide RNA and (b) an RNA extension at the 5′ or the 3′ end of the guide RNA, or at an intramolecular location in the guide RNA. The RNA extension can comprise (i) a reverse transcription template sequence comprising a desired nucleotide change, (ii) a reverse transcription primer binding site, and (iii) optionally, a linker sequence. In various embodiments, the reverse transcription template sequence may encode a single-strand DNA flap that is complementary to an endogenous DNA sequence adjacent to the nick site, wherein the single-strand DNA flap comprises the desired nucleotide change.

[0021] In various embodiments, the RNA extension is at least 5 nucleotides, at least 6 nucleotides, at least 7 nucleotides, at least 8 nucleotides, at least 9 nucleotides, at least 10 nucleotides, at least 11 nucleotides, at least 12 nucleotides, at least 13 nucleotides, at least 14 nucleotides, at least 15 nucleotides, at least 16 nucleotides, at least 17 nucleotides, at least 18 nucleotides, at least 19 nucleotides, at least 20 nucleotides, at least 21 nucleotides, at least 22 nucleotides, at least 23 nucleotides, at least 24 nucleotides, or at least 25 nucleotides in length.

[0022] In still other embodiments, the single-strand DNA flap may hybridize to the endogenous DNA sequence adjacent to the nick site, thereby installing the desired nucleotide change. In still other embodiments, the single-stranded DNA flap displaces the endogenous DNA sequence adjacent to the nick site and which has a free 5′ end. In certain embodiments, the displaced endogenous DNA having the 5′ end is excised by the cell.

[0023] In various embodiments, the cellular repair of the single-strand DNA flap results in installation of the desired nucleotide change, thereby forming a desired product.

[0024] In various other embodiments, the desired nucleotide change is installed in an editing window that is between about −4 to +10 of the PAM sequence.

[0025] In still other embodiments, the desired nucleotide change is installed in an editing window that is between about −5 to +5 of the nick site, or between about −10 to +10 of the nick site, or between about −20 to +20 of the nick site, or between about −30 to +30 of the nick site, or between about −40 to +40 of the nick site, or between about −50 to +50 of the nick site, or between about −60 to +60 of the nick site, or between about −70 to +70 of the nick site, or between about −80 to +80 of the nick site, or between about −90 to +90 of the nick site, or between about −100 to +100 of the nick site, or between about −200 to +200 of the nick site.

[0026] In various embodiments, the napDNAbp comprises an amino acid sequence of SEQ ID NO: 18. In various other embodiments, the napDNAbp comprises an amino acid sequence that is at least 80%, 85%, 90%, 95%, 98%, or 99% identical to the amino acid sequence of any one of SEQ ID NOs: 26-39, 42-61, 75-76, 126, 130, 137, 141, 147, 153, 157, 445, 460, 467, and 482-487 (Cas9); (SpCas9); SEQ ID NO: 77-86 (CP-Cas9); SEQ ID NO: 18-25 and 87-88 (SpCas9); and SEQ ID NOs: 62-72(Cas12)

[0027] In other embodiments, the reverse transcriptase of the disclosed fusion proteins and/or compositions may comprise any one of the amino acid sequences of SEQ ID NOs: 89-100, 105-122, 128-129, 132, 139, 143, 149, 154, 159, 235, 454, 471, 516, 662, 700-716, 739-742, and 766. In still other embodiments, the reverse transcriptase may comprise an amino acid sequence that is at least 80%, 85%, 90%, 95%, 98%, or 99% identical to the amino acid sequence of any one of SEQ ID NOs: 89-100, 105-122, 128-129, 132, 139, 143, 149, 154, 159, 235, 454, 471, 516, 662, 700-716, 739-742, and 766. These sequences may be naturally occurring reverse transcriptase sequences, e.g., from a retrovirus or a retrotransposon, of the sequences may be recombinant.

[0028] In various other embodiments, the fusion proteins herein disclosed may comprise various structural configurations. For example, the fusion proteins may comprise the structure NH₂-[napDNAbp]-[reverse transcriptase]-COOH; or NH₂-[reverse transcriptase]-[napDNAbp]-COOH, wherein each instance of “]-[” indicates the presence of an optional linker sequence.

[0029] In various embodiments, the linker sequence comprises an amino acid sequence of SEQ ID NOs: 127, 165-176, 446, 453, and 767-769, or an amino acid sequence that this at least 80%, 85%, or 90%, or 95%, or 99% identical to any one of the linker amino acid sequence of SEQ ID NOs: 127, 165-176, 446, 453, and 767-769.

[0030] In various embodiments, the desired nucleotide change that is incorporated into the target DNA can be a single nucleotide change (e.g., a transition or transversion), an insertion of one or more nucleotides, or a deletion of one or more nucleotides.

[0031] In certain cases, the insertion is at least 1, at least 2, at least 3, at least 4, at least 5, at least 6, at least 7, at least 8, at least 9, at least 10, at least 11, at least 12, at least 13, at least 14, at least 15, at least 16, at least 17, at least 18, at least 19, at least 20, at least 30, at least 40, at least 50, at least 60, at least 70, at least 80, at least 90, at least 100, at least 200, at least 300, at least 400, or at least 500 nucleotides in length.

[0032] In certain other cases, the deletion is at least 1, at least 2, at least 3, at least 4, at least 5, at least 6, at least 7, at least 8, at least 9, at least 10, at least 11, at least 12, at least 13, at least 14, at least 15, at least 16, at least 17, at least 18, at least 19, at least 20, at least 30, at least 40, at least 50, at least 60, at least 70, at least 80, at least 90, at least 100, at least 200, at least 300, at least 400, or at least 500 nucleotides in length.

[0033] In another aspect, the present disclosure provides an extended guide RNA comprising a guide RNA and at least one RNA extension. The RNA extension can be positioned at the 3′ end of the guide RNA. In other embodiments, the RNA extension can be positioned at the 5′ of the guide RNA. In still other embodiments, the RNA extension can be positioned at an intramolecular position within the guide RNA, however, preferable, the intramolecular positioning of the extended portion does not disrupt the functioning of the protospacer.

[0034] In various embodiments, the extended guide RNA is capable of binding to a napDNAbp and directing the napDNAbp to a target DNA sequence. The target DNA sequence can comprise a target strand and a complementary non-target strand, wherein the guide RNA hybridizes to the target strand to form an RNA-DNA hybrid and an R-loop.

[0035] In various embodiments of the extended guide RNA, the at least one RNA extension can comprise a reverse transcription template sequence. In various other embodiment, the RNA extension may further comprises a reverse transcription primer binding site. In still further embodiments, the RNA extension may comprise a linker or spacer sequence that joins the RNA extension to the guide RNA.

[0036] In various embodiments, the RNA extension can be at least 5 nucleotides, at least 6 nucleotides, at least 7 nucleotides, at least 8 nucleotides, at least 9 nucleotides, at least 10 nucleotides, at least 11 nucleotides, at least 12 nucleotides, at least 13 nucleotides, at least 14 nucleotides, at least 15 nucleotides, at least 16 nucleotides, at least 17 nucleotides, at least 18 nucleotides, at least 19 nucleotides, at least 20 nucleotides, at least 21 nucleotides, at least 22 nucleotides, at least 23 nucleotides, at least 24 nucleotides, at least 25 nucleotides, at least 30 nucleotides, at least 40 nucleotides, at least 50 nucleotides, at least 60 nucleotides, at least 70 nucleotides, at least 80 nucleotides, at least 90 nucleotides, at least 100 nucleotides, at least 150 nucleotides, at least 200 nucleotides, at least 300 nucleotides, at least 400 nucleotides, or at least 500 nucleotides in length.

[0037] In other embodiments, the reverse transcription template sequence is at least 3 nucleotides, at least 4 nucleotides, at least 5 nucleotides, at least 6 nucleotides, at least 7 nucleotides, at least 8 nucleotides, at least 9 nucleotides, at least 10 nucleotides, at least 11 nucleotides, at least 12 nucleotides, at least 13 nucleotides, at least 14 nucleotides, at least 15 nucleotides, at least 16 nucleotides, at least 17 nucleotides, at least 18 nucleotides, at least 19 nucleotides, at least 20 nucleotides, at least 30 nucleotides, at least 40 nucleotides, at least 50 nucleotides, at least 60 nucleotides, at least 70 nucleotides, at least 80 nucleotides, at least 90 nucleotides, at least 100 nucleotides, at least 200 nucleotides, at least 300 nucleotides, at least 400 nucleotides, or at least 500 nucleotides in length.

[0038] In still other embodiments, wherein the reverse transcription primer binding site sequence is at least 3 nucleotides, at least 4 nucleotides, at least 5 nucleotides, at least 6 nucleotides, at least 7 nucleotides, at least 8 nucleotides, at least 9 nucleotides, at least 10 nucleotides, at least 11 nucleotides, at least 12 nucleotides, at least 13 nucleotides, at least 14 nucleotides, at least 15 nucleotides, at least 16 nucleotides, at least 17 nucleotides, at least 18 nucleotides, at least 19 nucleotides, at least 20 nucleotides, at least 30 nucleotides, at least 40 nucleotides, at least 50 nucleotides, at least 60 nucleotides, at least 70 nucleotides, at least 80 nucleotides, at least 90 nucleotides, at least 100 nucleotides, at least 200 nucleotides, at least 300 nucleotides, at least 400 nucleotides, or at least 500 nucleotides in length.

[0039] In other embodiments, the optional linker or spacer sequence is at least 3 nucleotides, at least 4 nucleotides, at least 5 nucleotides, at least 6 nucleotides, at least 7 nucleotides, at least 8 nucleotides, at least 9 nucleotides, at least 10 nucleotides, at least 11 nucleotides, at least 12 nucleotides, at least 13 nucleotides, at least 14 nucleotides, at least 15 nucleotides, at least 16 nucleotides, at least 17 nucleotides, at least 18 nucleotides, at least 19 nucleotides, at least 20 nucleotides, at least 30 nucleotides, at least 40 nucleotides, at least 50 nucleotides, at least 60 nucleotides, at least 70 nucleotides, at least 80 nucleotides, at least 90 nucleotides, at least 100 nucleotides, at least 200 nucleotides, at least 300 nucleotides, at least 400 nucleotides, or at least 500 nucleotides in length.

[0040] In various embodiments of the extended guide RNAs, the reverse transcription template sequence may encode a single-strand DNA flap that is complementary to an endogenous DNA sequence adjacent to a nick site, wherein the single-strand DNA flap comprises a desired nucleotide change. The single-stranded DNA flap may displace an endogenous single-strand DNA at the nick site. The displaced endogenous single-strand DNA at the nick site can have a 5′ end and form an endogenous flap, which can be excised by the cell. In various embodiments, excision of the 5′ end endogenous flap can help drive product formation since removing the 5′ end endogenous flap encourages hybridization of the single-strand 3′ DNA flap to the corresponding complementary DNA strand, and the incorporation or assimilation of the desired nucleotide change carried by the single-strand 3′ DNA flap into the target DNA.

[0041] In various embodiments of the extended guide RNAs, the cellular repair of the single-strand DNA flap results in installation of the desired nucleotide change, thereby forming a desired product.

[0042] In certain embodiments, the PEgRNA comprises the nucleotide sequence of SEQ ID NOs: 101-104, 181-183, 223-234, 237-244, 277, 324-330, 332, 334, 336, 338, 340, 342, 344, 346, 348, 350, 352, 354, 356, 358, 360, 362, 364, 366, 368, 394, 429-442, 499-505, 641-649, 678-692, 735-736, 757-761, 776-777, 2997-3103, 3113-3121, 3305-3455, 3479-3493, 3522-3540, 3549-3556, 3628-3698, 3755-3810, 3874, 3890-3901, 3905-3911, 3913-3929, and 3972-3989, or a nucleotide sequence having at least 85%, or at least 90%, or at least 95%, or at least 98%, or at least 99% sequence identity with any one of SEQ ID NOs: 101-104, 181-183, 223-234, 237-244, 277, 324-330, 332, 334, 336, 338, 340, 342, 344, 346, 348, 350, 352, 354, 356, 358, 360, 362, 364, 366, 368, 394, 429-442, 499-505, 641-649, 678-692, 735-736, 757-761, 776-777, 2997-3103, 3113-3121, 3305-3455, 3479-3493, 3522-3540, 3549-3556, 3628-3698, 3755-3810, 3874, 3890-3901, 3905-3911, 3913-3929, and 3972-3989.

[0043] In yet another aspect of the invention, the specification provides for complexes comprising a fusion protein described herein and any extended guide RNA described above.

[0044] In still other aspects of the invention, the specification provides a complex comprising a napDNAbp and an extended guide RNA. The napDNAbp can be a Cas9 nickase, or can be an amino acid sequence of SEQ ID NOs: 42-57 (Cas9 nickase) and 65 (AsCas12a nickase), or an amino acid sequence that is at least 80%, 85%, 90%, 95%, 98%, or 99% identical to the amino acid sequence of any one of SEQ ID NOs: 42-57 (Cas9 nickase) and 65 (AsCas12a nickase).

[0045] In various embodiments involving a complex, the extended guide RNA is capable of directing the napDNAbp to a target DNA sequence. In various embodiments, a reverse transcriptase may be provided in trans, i.e., provided from a different source than the complex itself. For example, a reverse transcriptase could be provided to the same cell having the complex by introducing a separate vector separately encoding the reverse transcriptase.

[0046] In yet another aspect, the specification provides polynucleotides. In certain embodiments, the polynucleotides may encode any of the fusion proteins disclosed herein. In certain other embodiments, the polynucleotides may encode any of the napDNAbps disclosed herein. In still further embodiments, the polynucleotides may encode any of the reverse transcriptases disclosed herein. In yet other embodiments, the polynucleotides may encode any of the extended guide RNAs disclosed herein, any of the reverse transcription template sequences, or any of the reverse transcription primer sites, or any of the optional linker sequences.

[0047] In still other aspects, the specification provides vectors comprising the polynucleotides described herein. Thus, in certain embodiments, the vectors comprise polynucleotides for encoding the fusion proteins comprising a napDNAbp and a reverse transcriptase. In other embodiments, the vectors comprise polynucleotides that separately encode a napDNAbp and reverse transcriptase. In still other embodiments, the vectors may comprise polynucleotides that encode the extended guide RNAs. In various embodiments, the vectors may comprise one or more polynucleotides that encode napDNAbps, reverse transcriptase, and extended guide RNAs on the same or separate vectors.

[0048] In still other aspects, the specification provides cells comprising a fusion protein as described herein and an extended guide RNA. The cells may be transformed with the vectors comprising the fusion proteins, napDNAbps, reverse transcriptase, and extended guide RNAs. These genetic elements may be comprised on the same vectors or on different vectors.

[0049] In yet another aspect, the specification provides pharmaceutical compositions. In certain embodiments, the pharmaceutical compositions comprise one or more of a napDNAbp, a fusion protein, a reverse transcriptase, and an extended guide RNA. In certain embodiments, the fusion protein described herein and a pharmaceutically acceptable excipient. In other embodiments, the pharmaceutical compositions comprise any extend guide RNA described herein and a pharmaceutically acceptable excipient. In still other embodiments, the pharmaceutical compositions comprise any extend guide RNA described herein in combination with any fusion protein described herein and a pharmaceutically acceptable excipient. In yet other embodiments, the pharmaceutical compositions comprise any polynucleotide sequence encoding one or more of a napDNAbp, a fusion protein, a reverse transcriptase, and an extended guide RNA. In still other embodiments, the various components disclosed herein may be separated into one or more pharmaceutical compositions. For example, a first pharmaceutical composition may comprise a fusion protein or a napDNAbp, a second pharmaceutical compositions may comprise a reverse transcriptase, and a third pharmaceutical composition may comprise an extended guide RNA.

[0050] In still a further aspect, the present disclosure provides kits. In one embodiment, the kit comprises one or more polynucleotides encoding one or more components, including a fusion protein, a napDNAbp, a reverse transcriptase, and an extended guide RNA. The kits may also comprise vectors, cells, and isolated preparations of polypeptides, including any fusion protein, napDNAbp, or reverse transcriptase disclosed herein.

[0051] In yet another aspect, the present disclosure provides for methods of using the disclosed compositions of matter.

[0052] In one embodiment, the methods relate to a method for installing a desired nucleotide change in a double-stranded DNA sequence. The method first comprises contacting the double-stranded DNA sequence with a complex comprising a fusion protein and an extended guide RNA, wherein the fusion protein comprises a napDNAbp and a reverse transcriptase and wherein the extended guide RNA comprises a reverse transcription template sequence comprising the desired nucleotide change. Next, the method involves nicking the double-stranded DNA sequence on the non-target strand, thereby generating a free single-strand DNA having a 3′ end. The method then involves hybridizing the 3′ end of the free single-strand DNA to the reverse transcription template sequence, thereby priming the reverse transcriptase domain. The method then involves polymerizing a strand of DNA from the 3′ end, thereby generating a single-strand DNA flap comprising the desired nucleotide change. Then, the method involves replacing an endogenous DNA strand adjacent the cut site with the single-strand DNA flap, thereby installing the desired nucleotide change in the double-stranded DNA sequence.

[0053] In other embodiments, the disclosure provides for a method for introducing one or more changes in the nucleotide sequence of a DNA molecule at a target locus, comprising contacting the DNA molecule with a nucleic acid programmable DNA binding protein (napDNAbp) and a guide RNA which targets the napDNAbp to the target locus, wherein the guide RNA comprises a reverse transcriptase (RT) template sequence comprising at least one desired nucleotide change. Next, the method involves forming an exposed 3′ end in a DNA strand at the target locus and then hybridizing the exposed 3′ end to the RT template sequence to prime reverse transcription. Next, a single strand DNA flap comprising the at least one desired nucleotide change based on the RT template sequence is synthesized or polymerized by reverse transcriptase. Lastly, the at least one desired nucleotide change is incorporated into the corresponding endogenous DNA, thereby introducing one or more changes in the nucleotide sequence of the DNA molecule at the target locus.

[0054] In still other embodiments, the disclosure provides a method for introducing one or more changes in the nucleotide sequence of a DNA molecule at a target locus by target-primed reverse transcription, the method comprising: (a) contacting the DNA molecule at the target locus with a (i) fusion protein comprising a nucleic acid programmable DNA binding protein (napDNAbp) and a reverse transcriptase and (ii) a guide RNA comprising an RT template comprising a desired nucleotide change; (b) conducting target-primed reverse transcription of the RT template to generate a single strand DNA comprising the desired nucleotide change; and (c) incorporating the desired nucleotide change into the DNA molecule at the target locus through a DNA repair and/or replication process.

[0055] In certain embodiments, the step of replacing the endogenous DNA strand comprises: (i) hybridizing the single-strand DNA flap to the endogenous DNA strand adjacent the cut site to create a sequence mismatch; (ii) excising the endogenous DNA strand; and (iii) repairing the mismatch to form the desired product comprising the desired nucleotide change in both strands of DNA.

[0056] In various embodiments, the desired nucleotide change can be a single nucleotide substitution (e.g., and transition or a transversion change), a deletion, or an insertion. For example, the desired nucleotide change can be (1) a G to T substitution, (2) a G to A substitution, (3) a G to C substitution, (4) a T to G substitution, (5) a T to A substitution, (6) a T to C substitution, (7) a C to G substitution, (8) a C to T substitution, (9) a C to A substitution, (10) an A to T substitution, (11) an A to G substitution, or (12) an A to C substitution.

[0057] In other embodiments, the desired nucleoid change can convert (1) a G:C basepair to a T:A basepair, (2) a G:C basepair to an A:T basepair, (3) a G:C basepair to C:G basepair, (4) a T:A basepair to a G:C basepair, (5) a T:A basepair to an A:T basepair, (6) a T:A basepair to a C:G basepair, (7) a C:G basepair to a G:C basepair, (8) a C:G basepair to a T:A basepair, (9) a C:G basepair to an A:T basepair, (10) an A:T basepair to a T:A basepair, (11) an A:T basepair to a G:C basepair, or (12) an A:T basepair to a C:G basepair.

[0058] In still other embodiments, the method introduces a desired nucleotide change that is an insertion. In certain cases, the insertion is at least 1, at least 2, at least 3, at least 4, at least 5, at least 6, at least 7, at least 8, at least 9, at least 10, at least 11, at least 12, at least 13, at least 14, at least 15, at least 16, at least 17, at least 18, at least 19, at least 20, at least 30, at least 40, at least 50, at least 60, at least 70, at least 80, at least 90, at least 100, at least 200, at least 300, at least 400, or at least 500 nucleotides in length.

[0059] In other embodiments, the method introduces a desired nucleotide change that is a deletion. In certain other cases, the deletion is at least 1, at least 2, at least 3, at least 4, at least 5, at least 6, at least 7, at least 8, at least 9, at least 10, at least 11, at least 12, at least 13, at least 14, at least 15, at least 16, at least 17, at least 18, at least 19, at least 20, at least 30, at least 40, at least 50, at least 60, at least 70, at least 80, at least 90, at least 100, at least 200, at least 300, at least 400, or at least 500 nucleotides in length.

[0060] In various embodiments, the desired nucleotide change corrects a disease-associated gene. The disease-associated gene can be associated with a monogenetic disorder selected from the group consisting of: Adenosine Deaminase (ADA) Deficiency; Alpha-1 Antitrypsin Deficiency; Cystic Fibrosis; Duchenne Muscular Dystrophy; Galactosemia; Hemochromatosis; Huntington's Disease; Maple Syrup Urine Disease; Marfan Syndrome; Neurofibromatosis Type 1; Pachyonychia Congenita; Phenylkeotnuria; Severe Combined Immunodeficiency; Sickle Cell Disease; Smith-Lemli-Opitz Syndrome; and Tay-Sachs Disease. In other embodiments, the disease-associated gene can be associated with a polygenic disorder selected from the group consisting of: heart disease; high blood pressure; Alzheimer's disease; arthritis; diabetes; cancer; and obesity.

[0061] The methods disclosed herein may involve fusion proteins having a napDNAbp that is a nuclease dead Cas9 (dCas9), a Cas9 nickase (nCas9), or a nuclease active Cas9. In other embodiments, a napDNAbp and reverse transcriptase are not encoded as a single fusion protein, but rather can be provided in separate constructs. Thus, in some embodiments, the reverse transcriptase can be provided in trans relative to the napDNAbp (rather than by way of a fusion protein).

[0062] In various embodiments involving methods, the napDNAbp may comprise an amino acid sequence of SEQ ID NOs: 26-61, 75-76, 126, 130, 137, 141, 147, 153, 157, 445, 460, 467, and 482-487 (Cas9); (SpCas9); SEQ ID NO: 77-86 (CP-Cas9); SEQ ID NO: 18-25 and 87-88 (SpCas9); and SEQ ID NOs: 62-72(Cas12). The napDNAbp may also comprise an amino acid sequence that is at least 80%, 85%, 90%, 95%, 98%, or 99% identical to the amino acid sequence of any one of SEQ ID NOs: 26-61, 75-76, 126, 130, 137, 141, 147, 153, 157, 445, 460, 467, and 482-487 (Cas9); (SpCas9); SEQ ID NO: 77-86 (CP-Cas9); SEQ ID NO: 18-25 and 87-88 (SpCas9); and SEQ ID NOs: 62-72(Cas12).

[0063] In various embodiments involving methods, the reverse transcriptase may comprise any one of the amino acid sequences of SEQ ID NOs: 89-100, 105-122, 128-129, 132, 139, 143, 149, 154, 159, 235, 454, 471, 516, 662, 700-716, 739-742, and 766. The reverse transcriptase may also comprise an amino acid sequence that is at least 80%, 85%, 90%, 95%, 98%, or 99% identical to the amino acid sequence of any one of SEQ ID NOs: 89-100, 105-122, 128-129, 132, 139, 143, 149, 154, 159, 235, 454, 471, 516, 662, 700-716, 739-742, and 766.

[0064] The methods may involve the use of a PEgRNA comprising a nucleotide sequence of SEQ ID NOs: 101-104, 181-183, 223-234, 237-244, 277, 324-330, 332, 334, 336, 338, 340, 342, 344, 346, 348, 350, 352, 354, 356, 358, 360, 362, 364, 366, 368, 394, 429-442, 499-505, 641-649, 678-692, 735-736, 757-761, 776-777, 2997-3103, 3113-3121, 3305-3455, 3479-3493, 3522-3540, 3549-3556, 3628-3698, 3755-3810, 3874, 3890-3901, 3905-3911, 3913-3929, and 3972-3989, or a nucleotide sequence having at least 80%, or at least 85%, or at least 90%, or at least 95%, or at least 99% sequence identity thereto. The methods may comprise the use of extended guide RNAs that comprise an RNA extension at the 3′ end, wherein the RNA extension comprises the reverse transcription template sequence.

[0065] The methods may comprise the use of extended guide RNAs that comprise an RNA extension at the 5′ end, wherein the RNA extension comprises the reverse transcription template sequence.

[0066] The methods may comprise the use of extended guide RNAs that comprise an RNA extension at an intramolecular location in the guide RNA, wherein the RNA extension comprises the reverse transcription template sequence.

[0067] The methods may comprise the use of extended guide RNAs having one or more RNA extensions that are at least 1, at least 2, at least 3, at least 4, at least 5, at least 6, at least 7, at least 8, at least 9, at least 10, at least 11, at least 12, at least 13, at least 14, at least 15, at least 16, at least 17, at least 18, at least 19, at least 20, at least 30, at least 40, at least 50, at least 60, at least 70, at least 80, at least 90, at least 100, at least 200, at least 300, at least 400, or at least 500 nucleotides in length.

[0068] It should be appreciated that the foregoing concepts, and additional concepts discussed below, may be arranged in any suitable combination, as the present disclosure is not limited in this respect. Further, other advantages and novel features of the present disclosure will become apparent from the following detailed description of various non-limiting embodiments when considered in conjunction with the accompanying figures.

### BRIEF DESCRIPTION OF THE DRAWINGS

[0069] The following drawings form part of the present specification and are included to further demonstrate certain aspects of the present disclosure, which can be better understood by reference to one or more of these drawings in combination with the detailed description of specific embodiments presented herein.

[0070] FIG. 1A provides a schematic of an exemplary process for introducing a single nucleotide change, and/or insertion, and/or deletion into a DNA molecule (e.g., a genome) using a fusion protein comprising a reverse transcriptase fused to a Cas9 protein in complex with an extended guide RNA molecule. In this embodiment, the guide RNA is extended at the 3′ end to include a reverse transcriptase template sequence. The schematic shows how a reverse transcriptase (RT) fused to a Cas9 nickase, in a complex with a guide RNA (gRNA), binds the DNA target site and nicks the PAM-containing DNA strand adjacent to the target nucleotide. The RT enzyme uses the nicked DNA as a primer for DNA synthesis from the gRNA, which is used as a template for the synthesis of a new DNA strand that encodes the desired edit. The editing process shown may be referred to as target-primed reverse transcription editing (TRT editing) or equivalently, “prime editing.”

[0071] FIG. 1B provides the same representation as in FIG. 1A, except that the prime editor complex is represented more generally as [napDNAbp]-[P]:PEgRNA or [P]-[napDNAbp]:PEgRNA, wherein “P” refers to any polymerase (e.g., a reverse transcriptase), “napDNAbp” refers to a nucleic acid programmable DNA binding protein (e.g., SpCas9), and “PEgRNA” refers to a prime editing guide RNA, and “]-[” refers to an optional linker. As described elsewhere, e.g., FIGS. 3A-3G, the PEgRNA comprises an 5′ extension arm comprising a primer binding site and a DNA synthesis template. Although not shown, it is contemplated that the extension arm of the PEgRNA (i.e., which comprises a primer binding site and a DNA synthesis template) can be DNA or RNA. The particular polymerase contemplated in this configuration will depend upon the nature of the DNA synthesis template. For instance, if the DNA synthesis template is RNA, then the polymerase case be an RNA-dependent DNA polymerase (e.g., reverse transcriptase). If the DNA synthesis template is DNA, then the polymerase can be a DNA-dependent DNA polymerase.

[0072] FIG. 1C provides a schematic of an exemplary process for introducing a single nucleotide change, and/or insertion, and/or deletion into a DNA molecule (e.g., a genome) using a fusion protein comprising a reverse transcriptase fused to a Cas9 protein in complex with an extended guide RNA molecule. In this embodiment, the guide RNA is extended at the 5′ end to include a reverse transcriptase template sequence. The schematic shows how a reverse transcriptase (RT) fused to a Cas9 nickase, in a complex with a guide RNA (gRNA), binds the DNA target site and nicks the PAM-containing DNA strand adjacent to the target nucleotide. The RT enzyme uses the nicked DNA as a primer for DNA synthesis from the gRNA, which is used as a template for the synthesis of a new DNA strand that encodes the desired edit. The editing process shown may be referred to as target-primed reverse transcription editing (TRT editing) or equivalently, “prime editing.”

[0073] FIG. 1D provides the same representation as in FIG. 1C, except that the prime editor complex is represented more generally as [napDNAbp]-[P]:PEgRNA or [P]-[napDNAbp]:PEgRNA, wherein “P” refers to any polymerase (e.g., a reverse transcriptase), “napDNAbp” refers to a nucleic acid programmable DNA binding protein (e.g., SpCas9), and “PEgRNA” refers to a prime editing guide RNA, and “]-[” refers to an optional linker. As described elsewhere, e.g., FIGS. 3A-3G, the PEgRNA comprises an 3′ extension arm comprising a primer binding site and a DNA synthesis template. Although not shown, it is contemplated that the extension arm of the PEgRNA (i.e., which comprises a primer binding site and a DNA synthesis template) can be DNA or RNA. The particular polymerase contemplated in this configuration will depend upon the nature of the DNA synthesis template. For instance, if the DNA synthesis template is RNA, then the polymerase case be an RNA-dependent DNA polymerase (e.g., reverse transcriptase). If the DNA synthesis template is DNA, then the polymerase can be a DNA-dependent DNA polymerase. In various embodiments, the PEgRNA can be engineered or synthesized to incorporate a DNA-based DNA synthesis template.

[0074] FIG. 1E is a schematic depicting an exemplary process of how the synthesized single strand of DNA (which comprises the desired nucleotide change) becomes resolved such that the desired nucleotide change is incorporated into the DNA. As shown, following synthesis of the edited strand (or “mutagenic strand”), equilibration with the endogenous strand, flap cleavage of the endogenous strand, and ligation leads to incorporation of the DNA edit after resolution of the mismatched DNA duplex through the action of endogenous DNA repair and/or replication processes.

[0075] FIG. 1F is a schematic showing that “opposite strand nicking” can be incorporated into the resolution method of FIG. 1E to help drive the formation of the desired product versus the reversion product. In opposite strand nicking, a second Cas9/gRNA complex is used to introduce a second nick on the opposite strand from the initial nicked strand. This induces the endogenous cellular DNA repair and/or replication processes to preferentially replace the unedited strand (i.e., the strand containing the second nick site).

[0076] FIG. 1G provides another schematic of an exemplary process for introducing a single nucleotide change, and/or insertion, and/or deletion into a DNA molecule (e.g., a genome) of a target locus using a nucleic acid programmable DNA binding protein (napDNAbp) complexed with an extended guide RNA. This process may be referred to as an embodiment of prime editing. The extended guide RNA comprises an extension at the 3′ or 5′ end of the guide RNA, or at an intramolecular location in the guide RNA. In step (a), the napDNAbp/gRNA complex contacts the DNA molecule and the gRNA guides the napDNAbp to bind to the target locus. In step (b), a nick in one of the strands of DNA (the R-loop strand, or the PAM-containing strand, or the non-target DNA strand, or the protospacer strand) of the target locus is introduced (e.g., by a nuclease or chemical agent), thereby creating an available 3′ end in one of the strands of the target locus. In certain embodiments, the nick is created in the strand of DNA that corresponds to the R-loop strand, i.e., the strand that is not hybridized to the guide RNA sequence. In step (c), the 3′ end DNA strand interacts with the extended portion of the guide RNA in order to prime reverse transcription. In certain embodiments, the 3′ ended DNA strand hybridizes to a specific RT priming sequence on the extended portion of the guide RNA. In step (d), a reverse transcriptase is introduced which synthesizes a single strand of DNA from the 3′ end of the primed site towards the 3′ end of the guide RNA. This forms a single-strand DNA flap comprising the desired nucleotide change (e.g., the single base change, insertion, or deletion, or a combination thereof). In step (e), the napDNAbp and guide RNA are released. Steps (f) and (g) relate to the resolution of the single strand DNA flap such that the desired nucleotide change becomes incorporated into the target locus. This process can be driven towards the desired product formation by removing the corresponding 5′ endogenous DNA flap that forms once the 3′ single strand DNA flap invades and hybridizes to the complementary sequence on the other strand. The process can also be driven towards product formation with second strand nicking, as exemplified in FIG. 1F. This process may introduce at least one or more of the following genetic changes: transversions, transitions, deletions, and insertions.

[0077] FIG. 1H is a schematic depicting the types of genetic changes that are possible with the prime editing processes described herein. The types of nucleotide changes achievable by prime editing include deletions (including short and long deletions), single-nucleotide changes (including transitions and transversions), inversions, and insertions (including short and long deletions).

[0078] FIG. 1I is a schematic depicting temporal second strand nicking exemplified by PE3b (PE3b=PE2 prime editor fusion protein+PEgRNA+second strand nicking guide RNA). Temporal second strand nicking is a variant of second strand nicking in order to facilitate the formation of the desired edited product. The “temporal” term refers to the fact that the second-strand nick to the unedited strand occurs only after the desired edit is installed in the edited strand. This avoids concurrent nicks on both strands to lead to double-stranded DNA breaks.

[0079] FIGS. 1J-1K depict a variation of prime editing contemplated herein that replaces the napDNAbp (e.g., SpCas9 nickase) with any programmable nuclease domain, such as zinc finger nucleases (ZFN) or transcription activator-like effector nucleases (TALEN). As such, it is contemplated that suitable nucleases do not necessarily need to be “programmed” by a nucleic acid targeting molecule (such as a guide RNA), but rather, may be programmed by defining the specificity of a DNA-binding domain, such as and in particular, a nuclease. Just as in prime editing with napDNAbp moieties, it is preferable that such alternative programmable nucleases be modified such that only one strand of a target DNA is cut. In other words, the programmable nucleases should function as nickases, preferably. Once a programmable nuclease is selected (e.g., a ZFN or a TALEN), then additional functionalities may be engineered into the system to allow it to operate in accordance with a prime editing-like mechanism. For example, the programmable nucleases may be modified by coupling (e.g., via a chemical linker) an RNA or DNA extension arm thereto, wherein the extension arm comprises a primer binding site (PBS) and a DNA synthesis template. The programmable nuclease may also be coupled (e.g., via a chemical or amino acid linker) to a polymerase, the nature of which will depend upon whether the extension arm is DNA or RNA. In the case of an RNA extension arm, the polymerase can be an RNA-dependent DNA polymerase (e.g., reverse transcriptase). In the case of a DNA extension arm, the polymerase can be a DNA-dependent DNA polymerase (e.g., a prokaryotic polymerase, including Pol I, Pol II, or Pol III, or a eukaryotic polymerase, including Pol a, Pol b, Pol g, Pol d, Pol e, or Pol z). The system may also include other functionalities added as fusions to the programmable nucleases, or added in trans to facilitate the reaction as a whole (e.g., (a) a helicase to unwind the DNA at the cut site to make the cut strand with the 3′ end available as a primer, (b) a flap endonuclease (e.g., FEN1) to help remove the endogenous strand on the cut strand to drive the reaction towards replacement of the endogenous strand with the synthesized strand, or (c) a nCas9:gRNA complex to create a second site nick on the opposite strand, which may help drive the integration of the synthesize repair through favored cellular repair of the non-edited strand). In an analogous manner to prime editing with a napDNAbp, such a complex with an otherwise programmable nuclease could be used to synthesize and then install a newly synthesized replacement strand of DNA carrying an edit of interest permanently into a target site of DNA.

[0080] FIG. 1L depicts, in one embodiment, the anatomical features of a target DNA that may be edited by prime editing. The target DNA comprises a “non-target strand” and a “target strand.” The target-strand is the strand that becomes annealed to the spacer of a PEgRNA of a prime editor complex that recognizes the PAM site (in this case, NGG, which is recognized by the canonical SpCas9-based prime editors) The target strand may also be referred to as the “non-PAM strand” or the “non-edit strand.” By contrast, the non-target strand (i.e., the strand containing the protospacer and the PAM sequence of NGG) may be referred to as the “PAM-strand” or the “edit strand.” In various embodiments, the nick site of the PE complex will be in the protospacer on the PAM-strand (e.g., with the SpCas9-based PE). The location of the nick will be characteristic of the particular Cas9 that forms the PE. For example, with an SpCas9-based PE, the nick site in the phosphodiester bond between bases three (“−3” position relative to the position 1 of the PAM sequence) and four (“−4” position relative to position 1 of the PAM sequence). The nick site in the protospacer forms a free 3′ hydroxyl group, which as seen in the following figures, complexes with the primer binding site of the extension arm of the PEgRNA and provides the substrate to begin polymerization of a single strand of DNA code for by the DNA synthesis template of the extension arm of the PEgRNA. This polymerization reaction is catalyzed by the polymerase (e.g., reverse transcriptase) of the PE fusion protein in the 5′ to 3′ direction. Polymerization terminates before reaching the gRNA core (e.g., by inclusion of a polymerization termination signal, or secondary structure, which functions to terminate the polymerization activity of PE), producing a single strand DNA flap that is extended from the original 3′ hydroxyl group of the nicked PAM strand. The DNA synthesis template codes for a single strand DNA that is homologous to the endogenous 5′-ended single strand of DNA that immediately follows the nick site on the PAM strand and incorporates the desired nucleotide change (e.g., single base substitution, insertion, deletion, inversion). The position of the desired edit can be in any position following downstream of the nick site on the PAM strand, which can include position +1, +2, +3, +4 (the start of the PAM site), +5 (position 2 of the PAM site), +6 (position 3 of the PAM site), +7, +8, +9, +10, +11, +12, +13, +14, +15, +16, +17, +18, +19, +20, +21, +22, +23, +24, +25, +26, +27, +28, +29, +30, +31, +32, +33, +34, +35, +36, +37, +38, +39, +40, +41, +42, +43, +44, +45, +46, +47, +48, +49, +50, +51, +52, +53, +54, +55, +56, +57, +58, +59, +60, +61, +62, +63, +64, +65, +66, +67, +68, +69, +70, +71, +72, +73, +74, +75, +76, +77, +78, +79, +80, +81, +82, +83, +84, +85, +86, +87, +88, +89, +90, +91, +92, +93, +94, +95, +96, +97, +98, +99, +100, +101, +102, +103, +104, +105, +106, +107, +108, +109, +110, +111, +112, +113, +114, +115, +116, +117, +118, +119, +120, +121, +122, +123, +124, +125, +126, +127, +128, +129, +130, +131, +132, +133, +134, +135, +136, +137, +138, +139, +140, +141, +142, +143, +144, +145, +146, +147, +148, +149, or +150, or more (relative to the downstream position of the nick site). Once the 3′ end single stranded DNA (containing the edit of interest) replaces the endogenous 5′ end single stranded DNA, the DNA repair and replication processes will result in permanent installation of the edit site on the PAM strand, and then correction of the mismatch on the non-PAM strand that will exist at the edit site. In this way, the edit will extend to both strands of DNA on the target DNA site. It will be appreciated that reference to “edited strand” and “non-edited” strand only intends to delineate the strands of DNA involved in the PE mechanism. The “edited strand” is the strand that first becomes edited by replacement of the 5′ ended single strand DNA immediately downstream of the nick site with the synthesized 3′ ended single stranded DNA containing the desired edit. The “non-edited” strand is the strand pair with the edited strand, but which itself also becomes edited through repair and/or replication to be complementary to the edited strand, and in particular, the edit of interest.

[0081] FIG. 1M depicts the mechanism of prime editing showing the anatomical features of the target DNA, prime editor complex, and the interaction between the PEgRNA and the target DNA. First, a prime editor comprising a fusion protein having a polymerase (e.g., reverse transcriptase) and a napDNAbp (e.g., SpCas9 nickase, e.g., a SpCas9 having a deactivating mutation in an HNH nuclease domain (e.g., H840A) or a deactivating mutation in a RuvC nuclease domain (D10A)) is complexed with a PEgRNA and DNA having a target DNA to be edited. The PEgRNA comprises a spacer, gRNA core (aka gRNA scaffold or gRNA backbone) (which binds to the napDNAbp), and an extension arm. The extension arm can be at the 3′ end, the 5′ end, or somewhere within the PEgRNA molecule. As shown, the extension arm is at the 3′ end of the PEgRNA. The extension arm comprises in the 3′ to 5′ direction a primer binding site and a DNA synthesis template (comprising both an edit of interest and regions of homology (i.e., homology arms) that are homologous with the 5′ ended single stranded DNA immediately following the nick site on the PAM strand. As shown, once the nick is introduced thereby producing a free 3′ hydroxyl group immediately upstream of the nick site, the region immediately upstream of the nick site on the PAM strand anneals to a complementary sequence at the 3′ end of the extension arm referred to as the “primer binding site,” creating a short double-stranded region with an available 3′ hydroxyl end, which forms a substrate for the polymerase of the prime editor complex. The polymerase (e.g., reverse transcriptase) then polymerase as strand of DNA from the 3′ hydroxyl end to the end of the extension arm. The sequence of the single stranded DNA is coded for by the DNA synthesis template, which is the portion of the extension arm (i.e., excluding the primer binding site) that is “read” by the polymerase to synthesize new DNA. This polymerization effectively extends the sequence of the original 3′ hydroxyl end of the initial nick site. The DNA synthesis template encodes a single strand of DNA that comprises not only the desired edit, but also regions that are homologous to the endogenous single strand of DNA immediately downstream of the nick site on the PAM strand. Next, the encoded 3′ ended single strand of DNA (i.e., the 3′ single strand DNA flap) displaces the corresponding homologous endogenous 5′-ended single strand of DNA immediately downstream of the nick site on the PAM strand, forming a DNA intermediate having a 5′-ended single strand DNA flap, which is removed by the cell (e.g., by a flap endonuclease). The 3′-ended single strand DNA flap, which anneals to the complement of the endogenous 5′-ended single strand DNA flap, is ligated to the endogenous strand after the 5′ DNA flap is removed. The desired edit in the 3′ ended single strand DNA flap, now annealed and ligate, forms a mismatch with the complement strand, which undergoes DNA repair and/or a round of replication, thereby permanently installing the desired edit on both strands.

[0082] FIG. 2 shows three Cas complexes (SpCas9, SaCas9, and LbCas12a) that can be used in the herein described prime editors and their PAM, gRNA, and DNA cleavage features. The figure shows designs for complexes involving SpCas9, SaCas9, and LbCas12a.

[0083] FIGS. 3A-3F show designs for engineered 5′ prime editor gRNA (FIG. 3A), 3′ prime editor gRNA (FIG. 3B), and an intramolecular extension (FIG. 3C). The extended guide RNA (or extended gRNA) may also be referred to herein as PEgRNA or “prime editing guide RNA.” FIG. 3D and FIG. 3E provide additional embodiments of 3′ and 5′ prime editor gRNAs (PEgRNAs), respectively. FIG. 3F illustrates the interaction between a 3′ end prime editor guide RNA with a target DNA sequence. The embodiments of FIGS. 3A-3C depict exemplary arrangements of the reverse transcription template sequence (i.e., or more broadly referred to as a DNA synthesis template, as indicated, since the RT is only one type of polymerase that may be used in the context of prime editors), the primer binding site, and an optional linker sequence in the extended portions of the 3′, 5′, and intramolecular versions, as well as the general arrangements of the spacer and core regions. The disclosed prime editing process is not limited to these configurations of extended guide RNAs. The embodiment of FIG. 3D provides the structure of an exemplary PEgRNA contemplated herein. The PEgRNA comprises three main component elements ordered in the 5′ to 3′ direction, namely: a spacer, a gRNA core, and an extension arm at the 3′ end. The extension arm may further be divided into the following structural elements in the 5′ to 3′ direction, namely: a primer binding site (A), an edit template (B), and a homology arm (C). In addition, the PEgRNA may comprise an optional 3′ end modifier region (e1) and an optional 5′ end modifier region (e2). Still further, the PEgRNA may comprise a transcriptional termination signal at the 3′ end of the PEgRNA (not depicted). These structural elements are further defined herein. The depiction of the structure of the PEgRNA is not meant to be limiting and embraces variations in the arrangement of the elements. For example, the optional sequence modifiers (e1) and (e2) could be positioned within or between any of the other regions shown, and not limited to being located at the 3′ and 5′ ends. The PEgRNA could comprise, in certain embodiments, secondary RNA structure, such as, but not limited to, hairpins, stem/loops, toe loops, RNA-binding protein recruitment domains (e.g., the MS2 aptamer which recruits and binds to the MS2cp protein). For instance, such secondary structures could be position within the spacer, the gRNA core, or the extension arm, and in particular, within the e1 and/or e2 modifier regions. In addition to secondary RNA structures, the PEgRNAs could comprise (e.g., within the e1 and/or e2 modifier regions) a chemical linker or a poly(N) linker or tail, where “N” can be any nucleobase. In some embodiments (e.g., as shown in FIG. 72(c)), the chemical linker may function to prevent reverse transcription of the sgRNA scaffold or core. In addition, in certain embodiments (e.g., see FIG. 72(c)), the extension arm (3) could be comprised of RNA or DNA, and/or could include one or more nucleobase analogs (e.g., which might add functionality, such as temperature resilience). Still further, the orientation of the extension arm (3) can be in the natural 5′-to-3′ direction, or synthesized in the opposite orientation in the 3′-to-5′ direction (relative to the orientation of the PEgRNA molecule overall). It is also noted that one of ordinary skill in the art will be able to select an appropriate DNA polymerase, depending on the nature of the nucleic acid materials of the extension arm (i.e., DNA or RNA), for use in prime editing that may be implemented either as a fusion with the napDNAbp or as provided in trans as a separate moiety to synthesize the desired template-encoded 3′ single-strand DNA flap that includes the desired edit. For example, if the extension arm is RNA, then the DNA polymerase could be a reverse transcriptase or any other suitable RNA-dependent DNA polymerase. However, if the extension arm is DNA, then the DNA polymerase could be a DNA-dependent DNA polymerase. In various embodiments, provision of the DNA polymerase could be in trans, e.g., through the use of an RNA-protein recruitment domain (e.g., an MS2 hairpin installed on the PEgRNA (e.g., in the e1 or e2 region, or elsewhere and an MS2cp protein fused to the DNA polymerase, thereby co-localizing the DNA polymerase to the PEgRNA). It is also noted that the primer binding site does not generally form a part of the template that is used by the DNA polymerase (e.g., reverse transcriptase) to encode the resulting 3′ single-strand DNA flap that includes the desired edit. Thus, the designation of the “DNA synthesis template” refers to the region or portion of the extension arm (3) that is used as a template by the DNA polymerase to encode the desired 3′ single-strand DNA flap containing the edit and regions of homology to the 5′ endogenous single strand DNA flap that is replaced by the 3′ single strand DNA strand product of prime editing DNA synthesis. In some embodiments, the DNA synthesis template includes the “edit template” and the “homology arm”, or one or more homology arms, e.g., before and after the edit template. The edit template can be as small as a single nucleotide substitution, or it may be an insertion, or an inversion of DNA. In addition, the edit template may also include a deletion, which can be engineered by encoding homology arm that contains a desired deletion. In other embodiments, the DNA synthesis template may also include the e2 region or a portion thereof. For instance, if the e2 region comprises a secondary structure that causes termination of DNA polymerase activity, then it is possible that DNA polymerase function will be terminated before any portion of the e2 region is actual encoded into DNA. It is also possible that some or even all of the e2 region will be encoded into DNA. How much of e2 is actually used as a template will depend on its constitution and whether that constitution interrupts DNA polymerase function.

[0084] The embodiment of FIG. 3E provides the structure of another PEgRNA contemplated herein. The PEgRNA comprises three main component elements ordered in the 5′ to 3′ direction, namely: a spacer, a gRNA core, and an extension arm at the 3′ end. The extension arm may further be divided into the following structural elements in the 5′ to 3′ direction, namely: a primer binding site (A), an edit template (B), and a homology arm (C). In addition, the PEgRNA may comprise an optional 3′ end modifier region (e1) and an optional 5′ end modifier region (e2). Still further, the PEgRNA may comprise a transcriptional termination signal on the 3′ end of the PEgRNA (not depicted). These structural elements are further defined herein. The depiction of the structure of the PEgRNA is not meant to be limiting and embraces variations in the arrangement of the elements. For example, the optional sequence modifiers (e1) and (e2) could be positioned within or between any of the other regions shown, and not limited to being located at the 3′ and 5′ ends. The PEgRNA could comprise, in certain embodiments, secondary RNA structures, such as, but not limited to, hairpins, stem/loops, toe loops, RNA-binding protein recruitment domains (e.g., the MS2 aptamer which recruits and binds to the MS2cp protein). These secondary structures could be positioned anywhere in the PEgRNA molecule. For instance, such secondary structures could be position within the spacer, the gRNA core, or the extension arm, and in particular, within the e1 and/or e2 modifier regions. In addition to secondary RNA structures, the PEgRNAs could comprise (e.g., within the e1 and/or e2 modifier regions) a chemical linker or a poly(N) linker or tail, where “N” can be any nucleobase. In some embodiments (e.g., as shown in FIG. 72(c)), the chemical linker may function to prevent reverse transcription of the sgRNA scaffold or core. In addition, in certain embodiments (e.g., see FIG. 72(c)), the extension arm (3) could be comprised of RNA or DNA, and/or could include one or more nucleobase analogs (e.g., which might add functionality, such as temperature resilience). Still further, the orientation of the extension arm (3) can be in the natural 5′-to-3′ direction, or synthesized in the opposite orientation in the 3′-to-5′ direction (relative to the orientation of the PEgRNA molecule overall). It is also noted that one of ordinary skill in the art will be able to select an appropriate DNA polymerase, depending on the nature of the nucleic acid materials of the extension arm (i.e., DNA or RNA), for use in prime editing that may be implemented either as a fusion with the napDNAbp or as provided in trans as a separate moiety to synthesize the desired template-encoded 3′ single-strand DNA flap that includes the desired edit. For example, if the extension arm is RNA, then the DNA polymerase could be a reverse transcriptase or any other suitable RNA-dependent DNA polymerase. However, if the extension arm is DNA, then the DNA polymerase could be a DNA-dependent DNA polymerase. In various embodiments, provision of the DNA polymerase could be in trans, e.g., through the use of an RNA-protein recruitment domain (e.g., an MS2 hairpin installed on the PEgRNA (e.g., in the e1 or e2 region, or elsewhere and an MS2cp protein fused to the DNA polymerase, thereby co-localizing the DNA polymerase to the PEgRNA). It is also noted that the primer binding site does not generally form a part of the template that is used by the DNA polymerase (e.g., reverse transcriptase) to encode the resulting 3′ single-strand DNA flap that includes the desired edit. Thus, the designation of the “DNA synthesis template” refers to the region or portion of the extension arm (3) that is used as a template by the DNA polymerase to encode the desired 3′ single-strand DNA flap containing the edit and regions of homology to the 5′ endogenous single strand DNA flap that is replaced by the 3′ single strand DNA strand product of prime editing DNA synthesis. In some embodiments, the DNA synthesis template includes the “edit template” and the “homology arm”, or one or more homology arms, e.g., before and after the edit template. The edit template can be as small as a single nucleotide substitution, or it may be an insertion, or an inversion of DNA. In addition, the edit template may also include a deletion, which can be engineered by encoding homology arm that contains a desired deletion. In other embodiments, the DNA synthesis template may also include the e2 region or a portion thereof. For instance, if the e2 region comprises a secondary structure that causes termination of DNA polymerase activity, then it is possible that DNA polymerase function will be terminated before any portion of the e2 region is actual encoded into DNA. It is also possible that some or even all of the e2 region will be encoded into DNA. How much of e2 is actually used as a template will depend on its constitution and whether that constitution interrupts DNA polymerase function.

[0085] The schematic of FIG. 3F depicts the interaction of a typical PEgRNA with a target site of a double stranded DNA and the concomitant production of a 3′ single stranded DNA flap containing the genetic change of interest. The double strand DNA is shown with the top strand (i.e., the target strand) in the 3′ to 5′ orientation and the lower strand (i.e., the PAM strand or non-target strand) in the 5′ to 3′ direction. The top strand comprises the complement of the “protospacer” and the complement of the PAM sequence and is referred to as the “target strand” because it is the strand that is target by and anneals to the spacer of the PEgRNA. The complementary lower strand is referred to as the “non-target strand” or the “PAM strand” or the “protospacer strand” since it contains the PAM sequence (e.g., NGG) and the protospacer. Although not shown, the PEgRNA depicted would be complexed with a Cas9 or equivalent domain of a prime editor fusion protein. As shown in the schematic, the spacer of the PEgRNA anneals to the complementary region of the protospacer on the target strand. This interaction forms as DNA/RNA hybrid between the spacer RNA and the complement of the protospacer DNA, and induces the formation of an R loop in the protospacer. As taught elsewhere herein, the Cas9 protein (not shown) then induces a nick in the non-target strand, as shown. This then leads to the formation of the 3′ ssDNA flap region immediately upstream of the nick site which, in accordance with *z*, interacts with the 3′ end of the PEgRNA at the primer binding site. The 3′ end of the ssDNA flap (i.e., the reverse transcriptase primer sequence) anneals to the primer binding site (A) on the PEgRNA, thereby priming reverse transcriptase. Next, reverse transcriptase (e.g., provided in trans or provided cis as a fusion protein, attached to the Cas9 construct) then polymerizes a single strand of DNA which is coded for by the DNA synthesis template (including the edit template (B) and homology arm (C)). The polymerization continues towards the 5′ end of the extension arm. The polymerized strand of ssDNA forms a ssDNA 3′ end flap which, as describe elsewhere (e.g., as shown in FIG. 1G), invades the endogenous DNA, displacing the corresponding endogenous strand (which is removed as a 5′ ended DNA flap of endogenous DNA), and installing the desired nucleotide edit (single nucleotide base pair change, deletions, insertions (including whole genes) through naturally occurring DNA repair/replication rounds.

[0086] FIG. 3G depicts yet another embodiment of prime editing contemplated herein. In particular, the top schematic depicts one embodiment of a prime editor (PE), which comprises a fusion protein of a napDNAbp (e.g., SpCas9) and a polymerase (e.g., a reverse transcriptase), which are joined by a linker. The PE forms a complex with a PEgRNA by binding to the gRNA core of the PEgRNA. In the embodiment shown, the PEgRNA is equipped with a 3′ extension arm that comprises, beginning at the 3′ end, a primer binding site (PBS) followed by a DNA synthesis template. The bottom schematic depicts a variant of a prime editor, referred to as a “trans prime editor (tPE).” In this embodiment, the DNA synthesis template and PBS are decoupled from the PEgRNA and presented on a separate molecule, referred to as a trans prime editor RNA template (“tPERT”), which comprises an RNA-protein recruitment domain (e.g., a MS2 hairpin). The PE itself is further modified to comprise a fusion to a rPERT recruiting protein (“RP”), which is a protein which specifically recognizes and binds to the RNA-protein recruitment domain. In the example where the RNA-protein recruitment domain is an MS2 hairpin, the corresponding rPERT recruiting protein can be MS2cp of the MS2 tagging system. The MS2 tagging system is based on the natural interaction of the MS2 bacteriophage coat protein (“MCP” or “MS2cp”) with a stem-loop or hairpin structure present in the genome of the phage, i.e., the “MS2 hairpin” or “MS2 aptamer.” In the case of trans prime editing, the RP-PE:gRNA complex “recruits” a tPERT having the appropriate RNA-protein recruitment domain to co-localize with the PE:gRNA complex, thereby providing the PBS and DNA synthesis template in trans for use in prime editing, as shown in the example depicted in FIG. 3H.

[0087] FIG. 3H depicts the process of trans prime editing. In this embodiment, the trans prime editor comprises a “PE2” prime editor (i.e., a fusion of a Cas9(H840A) and a variant MMLV RT) fused to an MS2cp protein (i.e., a type of recruiting protein that recognizes and binds to an MS2 aptamer) and which is complexed with an sgRNA (i.e., a standard guide RNA as opposed to a PEgRNA). The trans prime editor binds to the target DNA and nicks the nontarget strand. The MS2cp protein recruits a tPERT in trans through the specific interaction with the RNA-protein recruitment domain on the tPERT molecule. The tPERT becomes co-localized with the trans prime editor, thereby providing the PBS and DNA synthesis template functions in trans for use by the reverse transcriptase polymerase to synthesize a single strand DNA flap having a 3′ end and containing the desired genetic information encoded by the DNA synthesis template.

[0088] FIGS. 4A-4E demonstrate in vitro TPRT assays (i.e., prime editing assays). FIG. 4A is a schematic of fluorescently labeled DNA substrates gRNA templated extension by an RT enzyme, PAGE. FIG. 4B shows TPRT (i.e., prime editing) with pre-nicked substrates, dCas9, and 5′-extended gRNAs of differing synthesis template length. FIG. 4C shows the RT reaction with pre-nicked DNA substrates in the absence of Cas9. FIG. 4D shows TPRT (i.e., prime editing) on full dsDNA substrates with Cas9(H840A) and 5′-extended gRNAs. FIG. 4E shows a 3′-extended gRNA template with pre-nicked and full dsDNA substrates. All reactions are with M-MLV RT.

[0089] FIG. 5 shows in vitro validations using 5′-extended gRNAs with varying length synthesis templates. Fluorescently labeled (Cy5) DNA targets were used as substrates, and were pre-nicked in this set of experiments. The Cas9 used in these experiments is catalytically dead Cas9 (dCas9), and the RT used is Superscript III, a commercial RT derived from the Moloney-Murine Leukemia Virus (M-MLV). dCas9:gRNA complexes were formed from purified components. Then, the fluorescently labeled DNA substrate was added along with dNTPs and the RT enzyme. After 1 hour of incubation at 37° C., the reaction products were analyzed by denaturing urea-polyacrylamide gel electrophoresis (PAGE). The gel image shows extension of the original DNA strand to lengths that are consistent with the length of the reverse transcription template.

[0090] FIG. 6 shows in vitro validations using 5′-extended gRNAs with varying length synthesis templates, which closely parallels those shown in FIG. 5. However, the DNA substrates are not pre-nicked in this set of experiments. The Cas9 used in these experiments is a Cas9 nickase (SpyCas9 H840A mutant) and the RT used is Superscript III, a commercial RT derived from the Moloney-Murine Leukemia Virus (M-MLV). The reaction products were analyzed by denaturing urea-polyacrylamide gel electrophoresis (PAGE). As shown in the gel, the nickase efficiently cleaves the DNA strand when the standard gRNA is used (gRNA_0, lane 3).

[0091] FIG. 7 demonstrates that 3′ extensions support DNA synthesis and do not significantly effect Cas9 nickase activity. Pre-nicked substrates (black arrow) are near-quantitatively converted to RT products when either dCas9 or Cas9 nickase is used (lanes 4 and 5). Greater than 50% conversion to the RT product (red arrow) is observed with full substrates (lane 3). Cas9 nickase (SpyCas9 H840A mutant), catalytically dead Cas9 (dCas9) and Superscript III, a commercial RT derived from the Moloney-Murine Leukemia Virus (M-MLV) are used.

[0092] FIG. 8 demonstrates dual color experiments that were used to determine if the RT reaction preferentially occurs with the gRNA in cis (bound in the same complex). Two separate experiments were conducted for 5′-extended and 3′-extended gRNAs. Products were analyzed by PAGE. Product ratio calculated as (Cy3cis/Cy3trans)/(Cy5trans/Cy5cis).

[0093] FIGS. 9A-9D demonstrates a flap model substrate. FIG. 9A shows a dual-FP reporter for flap-directed mutagenesis. FIG. 9B shows stop codon repair in HEK cells. FIG. 9C shows sequenced yeast clones after flap repair. FIG. 9D shows testing of different flap features in human cells.

[0094] FIG. 10 demonstrates prime editing on plasmid substrates. A dual-fluorescent reporter plasmid was constructed for yeast (S. cerevisiae) expression. Expression of this construct in yeast produces only GFP. The in vitro prime editing reaction introduces a point mutation, and transforms the parent plasmid or an in vitro Cas9(H840A) nicked plasmid into yeast. The colonies are visualized by fluorescence imaging. Yeast dual-FP plasmid transformants are shown. Transforming the parent plasmid or an in vitro Cas9(H840A) nicked plasmid results in only green GFP expressing colonies. The prime editing reaction with 5′-extended or 3′-extended gRNAs produces a mix of green and yellow colonies. The latter express both GFP and mCherry. More yellow colonies are observed with the 3′-extended gRNA. A positive control that contains no stop codon is shown as well.

[0095] FIG. 11 shows prime editing on plasmid substrates similar to the experiment in FIG. 10, but instead of installing a point mutation in the stop codon, prime editing installs a single nucleotide insertion (left) or deletion (right) that repairs a frameshift mutation and allows for synthesis of downstream mCherry. Both experiments used 3′ extended gRNAs.

[0096] FIG. 12 shows editing products of prime editing on plasmid substrates, characterized by Sanger sequencing. Individually colonies from the TRT transformations were selected and analyzed by Sanger sequencing. Precise edits were observed by sequencing select colonies. Green colonies contained plasmids with the original DNA sequence, while yellow colonies contained the precise mutation designed by the prime editing gRNA. No other point mutations or indels were observed.

[0097] FIG. 13 shows the potential scope for the new prime editing technology is shown and compared to deaminase-mediated base editor technologies.

[0098] FIG. 14 shows a schematic of editing in human cells.

[0099] FIG. 15 demonstrates the extension of the primer binding site in gRNA.

[0100] FIG. 16 shows truncated gRNAs for adjacent targeting.

[0101] FIGS. 17A-17C are graphs displaying the % T to A conversion at the target nucleotide after transfection of components in human embryonic kidney (HEK) cells. FIG. 17A shows data, which presents results using an N-terminal fusion of wild type MLV reverse transcriptase to Cas9(H840A) nickase (32-amino acid linker). FIG. 17B is similar to FIG. 17A, but for C-terminal fusion of the RT enzyme. FIG. 17C is similar to FIG. 17A but the linker between the MLV RT and Cas9 is 60 amino acids long instead of 32 amino acids.

[0102] FIG. 18 shows high purity T to A editing at HEK3 site by high-throughput amplicon sequencing. The output of sequencing analysis displays the most abundant genotypes of edited cells.

[0103] FIG. 19 shows editing efficiency at the target nucleotide (blue bars) alongside indel rates (orange bars). WT refers to the wild type MLV RT enzyme. The mutant enzymes (M1 through M4) contain the mutations listed to the right. Editing rates were quantified by high throughput sequencing of genomic DNA amplicons.

[0104] FIG. 20 shows editing efficiency of the target nucleotide when a single strand nick is introduced in the complementary DNA strand in proximity to the target nucleotide. Nicking at various distances from the target nucleotide was tested (triangles). Editing efficiency at the target base pair (blue bars) is shown alongside the indel formation rate (orange bars). The “none” example does not contain a complementary strand nicking guide RNA. Editing rates were quantified by high throughput sequencing of genomic DNA amplicons.

[0105] FIG. 21 demonstrates processed high throughput sequencing data showing the desired T to A transversion mutation and general absence of other major genome editing byproducts.

[0106] FIG. 22 provides a schematic of an exemplary process for conducting targeted mutagenesis with an error-prone reverse transcriptase on a target locus using a nucleic acid programmable DNA binding protein (napDNAbp) complexed with an extended guide RNA, i.e., prime editing with an error-prone RT. This process may be referred to as an embodiment of prime editing for targeted mutagenesis. The extended guide RNA comprises an extension at the 3′ or 5′ end of the guide RNA, or at an intramolecular location in the guide RNA. In step (a), the napDNAbp/gRNA complex contacts the DNA molecule and the gRNA guides the napDNAbp to bind to the target locus to be mutagenized. In step (b), a nick in one of the strands of DNA of the target locus is introduced (e.g., by a nuclease or chemical agent), thereby creating an available 3′ end in one of the strands of the target locus. In certain embodiments, the nick is created in the strand of DNA that corresponds to the R-loop strand, i.e., the strand that is not hybridized to the guide RNA sequence. In step (c), the 3′ end DNA strand interacts with the extended portion of the guide RNA in order to prime reverse transcription. In certain embodiments, the 3′ ended DNA strand hybridizes to a specific RT priming sequence on the extended portion of the guide RNA. In step (d), an error-prone reverse transcriptase is introduced which synthesizes a mutagenized single strand of DNA from the 3′ end of the primed site towards the 3′ end of the guide RNA. Exemplary mutations are indicated with an asterisk “*”. This forms a single-strand DNA flap comprising the desired mutagenized region. In step (e), the napDNAbp and guide RNA are released. Steps (f) and (g) relate to the resolution of the single strand DNA flap (comprising the mutagenized region) such that the desired mutagenized region becomes incorporated into the target locus. This process can be driven towards the desired product formation by removing the corresponding 5′ endogenous DNA flap that forms once the 3′ single strand DNA flap invades and hybridizes to the complementary sequence on the other strand. The process can also be driven towards product formation with second strand nicking, as exemplified in FIG. 1F. Following endogenous DNA repair and/or replication processes, the mutagenized region becomes incorporated into both strands of DNA of the DNA locus.

[0107] FIG. 23 is a schematic of gRNA design for contracting trinucleotide repeat sequences and trinucleotide repeat contraction with TPRT genome editing (i.e., prime editing). Trinucleotide repeat expansion is associated with a number of human diseases, including Huntington's disease, Fragile X syndrome, and Friedreich's ataxia. The most common trinucleotide repeat contains CAG triplets, though GAA triplets (Friedreich's ataxia) and CGG triplets (Fragile X syndrome) also occur. Inheriting a predisposition to expansion, or acquiring an already expanded parental allele, increases the likelihood of acquiring the disease. Pathogenic expansions of trinucleotide repeats could hypothetically be corrected using prime editing. A region upstream of the repeat region can be nicked by an RNA-guided nuclease, then used to prime synthesis of a new DNA strand that contains a healthy number of repeats (which depends on the particular gene and disease). After the repeat sequence, a short stretch of homology is added that matches the identity of the sequence adjacent to the other end of the repeat (red strand). Invasion of the newly synthesized strand, and subsequent replacement of the endogenous DNA with the newly synthesized flap, leads to a contracted repeat allele.

[0108] FIG. 24 is a schematic showing precise 10-nucleotide deletion with prime editing. A guide RNA targeting the HEK3 locus was designed with a reverse transcription template that encodes a 10-nucleotide deletion after the nick site. Editing efficiency in transfected HEK cells was assessed using amplicon sequencing.

[0109] FIG. 25 is a schematic showing gRNA design for peptide tagging genes at endogenous genomic loci and peptide tagging with TPRT genome editing (i.e., prime editing). The FlAsH and ReAsH tagging systems comprise two parts: (1) a fluorophore-biarsenical probe, and (2) a genetically encoded peptide containing a tetracysteine motif, exemplified by the sequence FLNCCPGCCMEP (SEQ ID NO: 1). When expressed within cells, proteins containing the tetracysteine motif can be fluorescently labeled with fluorophore-arsenic probes (see ref: J. Am. Chem. Soc., 2002, 124 (21), pp 6063-6076. DOI: 10.1021/ja017687n). The “sortagging” system employs bacterial sortase enzymes that covalently conjugate labeled peptide probes to proteins containing suitable peptide substrates (see ref: Nat. Chem. Biol. 2007 November; 3(11):707-8. DOI: 10.1038/nchembio. 2007.31). The FLAG-tag (DYKDDDDK (SEQ ID NO: 2)), V5-tag (GKPIPNPLLGLDST (SEQ ID NO: 3)), GCN4-tag (EELLSKNYHLENEVARLKK (SEQ ID NO: 4)), HA-tag (YPYDVPDYA (SEQ ID NO: 5)), and Myc-tag (EQKLISEEDL (SEQ ID NO: 6)) are commonly employed as epitope tags for immunoassays. The pi-clamp encodes a peptide sequence (FCPF (SEQ ID NO: 622)) that can by labeled with a pentafluoro-aromatic substrates (ref: Nat. Chem. 2016 February; 8(2):120-8. doi: 10.1038/nchem.2413).

[0110] FIG. 26A shows precise installation of a His6-tag and a FLAG-tag into genomic DNA. A guide RNA targeting the HEK3 locus was designed with a reverse transcription template that encodes either an 18-nt His-tag insertion or a 24-nt FLAG-tag insertion. Editing efficiency in transfected HEK cells was assessed using amplicon sequencing. Note that the full 24-nt sequence of the FLAG-tag is outside of the viewing frame (sequencing confirmed full and precise insertion). FIG. 26B shows a schematic outlining various applications involving protein/peptide tagging, including (a) rendering proteins soluble or insoluble, (b) changing or tracking the cellular localization of a protein, (c) extending the half-life of a protein, (d) facilitating protein purification, and (e) facilitating the detection of proteins.

[0111] FIG. 27 shows an overview of prime editing by installing a protective mutation in PRNP that prevents or halts the progression of prion disease. The PEgRNA sequences correspond to residue numbers 1-20 of SEQ ID NO: 810 on the left (i.e., 5′ of the sgRNA scaffold) and residue numbers 21-43 of SEQ ID NO 810 on the right (i.e., 3′ of the sgRNA scaffold).

[0112] FIG. 28A is a schematic of PE-based insertion of sequences encoding RNA motifs.

[0113] FIG. 28B is a list (not exhaustive) of some example motifs that could potentially be inserted, and their functions.

[0114] FIG. 29A is a depiction of a prime editor. FIG. 29B shows possible modifications to genomic, plasmid, or viral DNA directed by a PE. FIG. 29C shows an example scheme for insertion of a library of peptide loops into a specified protein (in this case GFP) via a library of PEgRNAs. FIG. 29D shows an example of possible programmable deletions of codons or N-, or C-terminal truncations of a protein using different PEgRNAs. Deletions would be predicted to occur with minimal generation of frameshift mutations.

[0115] FIG. 30 shows a possible scheme for iterative insertion of codons in a continual evolution system, such as PACE.

[0116] FIG. 31 is an illustration of an engineered gRNA showing the gRNA core, ˜20nt spacer matching the sequence of the targeted gene, the reverse transcription template with immunogenic epitope nucleotide sequence and the primer binding site matching the sequence of the targeted gene.

[0117] FIG. 32 is a schematic showing using prime editing as a means to insert known immunogenicity epitopes into endogenous or foreign genomic DNA, resulting in modification of the corresponding proteins.

[0118] FIG. 33 is a schematic showing PEgRNA design for primer binding sequence insertions and primer binding insertion into genomic DNA using prime editing for determining off-target editing. In this embodiment, prime editing is conducted inside a living cell, a tissue, or an animal model. As a first step, an appropriate PEgRNA is designed. The top schematic shows an exemplary PEgRNA that may be used in this aspect. The spacer in the PEgRNA (labeled “protospacer”) is complementary to one of the strands of the genomic target. The PE:PEgRNA complex (i.e., the PE complex) installs a single stranded 3′ end flap at the nick site which contains the encoded primer binding sequence and the region of homology (coded by the homology arm of the PEgRNA) that is complementary to the region just downstream of the cut site (in red). Through flap invasion and DNA repair/replication processes, the synthesized strand becomes incorporated into the DNA, thereby installing the primer binding site. This process can occur at the desired genomic target, but also at other genomic sites that might interact with the PEgRNA in an off-target manner (i.e., the PEgRNA guides the PE complex to other off-target sites due to the complementarity of the spacer region to other genomic sites that are not the intended genomic site). Thus, the primer binding sequence may be installed not only at the desired genomic target, but at off-target genomic sites elsewhere in the genome. In order to detect the insertion of these primer binding sites at both the intended genomic target sites and the off-target genomic sites, the genomic DNA (post-PE) can be isolated, fragmented, and ligated to adapter nucleotides (shown in red). Next, PCR may be carried out with PCR oligonucleotides that anneal to the adapters and to the inserted primer binding sequence to amplify on-target and off-target genomic DNA regions into which the primer binding site was inserted by PE. High throughput sequencing then me be conducted to and sequence alignments to identify the insertion points of PE-inserted primer binding sequences at either the on-target site or at off-target sites.

[0119] FIG. 34 is a schematic showing the precise insertion of a gene with PE.

[0120] FIG. 35A is a schematic showing the natural insulin signaling pathway. FIG. 35B is a schematic showing FKBP12-tagged insulin receptor activation controlled by FK1012.

[0121] FIG. 36 shows small-molecule monomers. References: bumped FK506 mimic (2)¹⁰⁷

[0122] FIGS. 37A-37B show small-molecule dimers. References: FK1012 4^{95,96}; FK1012 5¹⁰⁸; FK1012 6¹⁰⁷; AP1903 7¹⁰⁷; cyclosporin A dimer 898; FK506-cyclosporin A dimer (FkCsA) 9100

[0123] FIGS. 38A-38F provide an overview of prime editing and feasibility studies in vitro and in yeast cells. FIG. 38A shows the 75,122 known pathogenic human genetic variants in ClinVar (accessed July, 2019), classified by type. FIG. 38B shows that a prime editing complex consists of a prime editor (PE) protein containing an RNA-guided DNA-nicking domain, such as Cas9 nickase, fused to an engineered reverse transcriptase domain and complexed with a prime editing guide RNA (PEgRNA). The PE:PEgRNA complex binds the target DNA site and enables a large variety of precise DNA edits at a wide range of DNA positions before or after the target site's protospacer adjacent motif (PAM). FIG. 38C shows that upon DNA target binding, the PE:PEgRNA complex nicks the PAM-containing DNA strand. The resulting free 3′ end hybridizes to the primer-binding site of the PEgRNA. The reverse transcriptase domain catalyzes primer extension using the RT template of the PEgRNA, resulting in a newly synthesized DNA strand containing the desired edit (the 3′ flap).Equilibration between the edited 3′ flap and the unedited 5′ flap containing the original DNA, followed by cellular 5′ flap cleavage and ligation, and DNA repair or replication to resolve the heteroduplex DNA, results in stably edited DNA. FIG. 38D shows in vitro 5′-extended PEgRNA primer extension assays with pre-nicked dsDNA substrates containing 5′-Cy5 labeled PAM strands, dCas9, and a commercial M-MLV RT variant (RT, Superscript III). dCas9 was complexed with PEgRNAs containing RT template of varying lengths, then added to DNA substrates along with the indicated components. Reactions were incubated at 37° C. for 1 hour, then analyzed by denaturing urea PAGE and visualized for Cy5 fluorescence. FIG. 38E shows primer extension assays performed as in FIG. 38D using 3′-extended PEgRNAs pre-complexed with dCas9 or Cas9 H840A nickase, and pre-nicked or non-nicked 5′-Cy5-labeled dsDNA substrates. FIG. 38F shows yeast colonies transformed with GFP-mCherry fusion reporter plasmids edited in vitro with PEgRNAs, Cas9 nickase, and RT. Plasmids containing nonsense or frameshift mutations between GFP and mCherry were edited with 5′-extended or 3′—extended PEgRNAs that restore mCherry translation via transversion mutation, 1-bp insertion, or 1-bp deletion. GFP and mCherry double-positive cells (yellow) reflect successful editing.

[0124] FIGS. 39A-39D show prime editing of genomic DNA in human cells by PE1 and PE2. FIG. 39A shows PEgRNAs contain a spacer sequence, a sgRNA scaffold, and a 3′ extension containing a primer-binding site (green) and a reverse transcription (RT) template (purple), which contains the edited base(s) (red). The primer-binding site hybridizes to the PAM-containing DNA strand immediately upstream of the site of nicking. The RT template is homologous to the DNA sequence downstream of the nick, with the exception of the encoded edit. FIG. 39B shows an installation of a T⋅A-to-A⋅T transversion edit at the HEK3 site in HEK293T cells using Cas9 H840A nickase fused to wild-type M-MLV reverse transcriptase (PE1) and PEgRNAs of varying primer-binding site lengths. FIG. 39C shows the use of an engineered pentamutant M-MLV reverse transcriptase (D200N, L603W, T306K, W313F, T330P) in PE2 substantially improves prime editing transversion efficiencies at five genomic sites in HEK293T cells, and small insertion and small deletion edits at HEK3. FIG. 39D is a comparison of PE2 editing efficiencies with varying RT template lengths at five genomic sites in HEK293T cells. Values and error bars reflect the mean and s.d. of three independent biological replicates.

[0125] FIGS. 40A-40C show PE3 and PE3b systems nick the non-edited strand to increase prime editing efficiency. FIG. 40A is an overview of the prime editing by PE3. After initial synthesis of the edited strand, DNA repair will remove either the newly synthesized strand containing the edit (3′ flap excision) or the original genomic DNA strand (5′ flap excision). 5′ flap excision leaves behind a DNA heteroduplex containing one edited strand and one non-edited strand. Mismatch repair machinery or DNA replication could resolve the heteroduplex to give either edited or non-edited products. Nicking the non-edited strand favors repair of that strand, resulting in preferential generation of stable duplex DNA containing the desired edit. FIG. 40B shows the effect of complementary strand nicking on PE3-mediated prime editing efficiency and indel formation. “None” refers to PE2 controls, which do not nick the complementary strand. FIG. 40C is a comparison of editing efficiencies with PE2 (no complementary strand nick), PE3 (general complementary strand nick), and PE3b (edit-specific complementary strand nick). All editing yields reflect the percentage of total sequencing reads that contain the intended edit and do not contain indels among all treated cells, with no sorting. Values and error bars reflect the mean and s.d. of three independent biological replicates.

[0126] FIGS. 41A-41K show targeted insertions, deletions, and all 12 types of point mutations with PE3 at seven endogenous human genomic loci in HEK293T cells. FIG. 41A is a graph showing all 12 types of single-nucleotide transition and transversion edits from position +1 to +8 (counting the location of the PEgRNA-induced nick as between position +1 and −1) of the HEK3 site using a 10-nt RT template. FIG. 41B is a graph showing long-range PE3 transversion edits at the HEK3 site using a 34-nt RT template. FIGS. 41C-41H are graphs showing all 12 types of transition and transversion edits at various positions in the prime editing window for (FIG. 41C) RNF2, (FIG. 41D) FANCF, (FIG. 41E) EMX1, (FIG. 41F) RUNX1, (FIG. 41G) VEGFA, and (FIG. 41H) DNMT1. FIG. 41I is a graph showing targeted 1- and 3-bp insertions, and 1- and 3-bp deletions with PE3 at seven endogenous genomic loci. FIG. 41J is a graph showing the targeted precise deletions of 5 to 80 bp at the HEK3 target site. FIG. 41K is a graph showing a combination edits of insertions and deletions, insertions and point mutations, deletions and point mutations, and double point mutations at three endogenous genomic loci. All editing yields reflect the percentage of total sequencing reads that contain the intended edit and do not contain indels among all treated cells, with no sorting. Values and error bars reflect the mean and s.d. of three independent biological replicates.

[0127] FIGS. 42A-42H show the comparison of prime editing and base editing, and off-target editing by Cas9 and PE3 at known Cas9 off-target sites. FIG. 42A shows total C⋅G-to-T⋅A editing efficiency at the same target nucleotides for PE2, PE3, BE2max, and BE4max at endogenous HEK3, FANCF, and EMX1 sites in HEK293T cells. FIG. 42B shows indel frequency from treatments in FIG. 42A. FIG. 42C shows the editing efficiency of precise C⋅G-to-T⋅A edits (without bystander edits or indels) for PE2, PE3, BE2max, and BE4max at HEK3, FANCF, and EMX1. For EMX1, precise PE combination edits of all possible combinations of C⋅G-to-T⋅A conversion at the three targeted nucleotides are also shown. FIG. 42D shows the total A⋅T-to-G⋅C editing efficiency for PE2, PE3, ABEdmax, and ABEmax at HEK3 and FANCF. FIG. 42E shows the precise A⋅T-to-G⋅C editing efficiency without bystander edits or indels for at HEK3 and FANCF. FIG. 42F shows indel frequency from treatments in FIG. 42D. FIG. 42G shows the average triplicate editing efficiencies (percentage sequencing reads with indels) in HEK293T cells for Cas9 nuclease at four on-target and 16 known off-target sites. The 16 off-target sites examined were the top four previously reported off-target sites^{118,159} for each of the four on-target sites. For each on-target site, Cas9 was paired with a sgRNA or with each of four PEgRNAs that recognize the same protospacer. FIG. 42H shows the average triplicate on-target and off-target editing efficiencies and indel efficiencies (below in parentheses) in HEK293T cells for PE2 or PE3 paired with each PEgRNA in (FIG. 42G). On-target editing yields reflect the percentage of total sequencing reads that contain the intended edit and do not contain indels among all treated cells, with no sorting. Off-target editing yields reflect off-target locus modification consistent with prime editing. Values and error bars reflect the mean and s.d. of three independent biological replicates.

[0128] FIGS. 43A-43I show prime editing in various human cell lines and primary mouse cortical neurons, installation and correction of pathogenic transversion, insertion, or deletion mutations, and comparison of prime editing and HDR. FIG. 43A is a graph showing the installation (via T⋅A-to-A⋅T transversion) and correction (via A⋅T-to-T⋅A transversion) of the pathogenic E6V mutation in HBB in HEK293T cells. Correction either to wild-type HBB, or to HBB containing a silent mutation that disrupts the PEgRNA PAM, is shown. FIG. 43B is a graph showing the installation (via 4-bp insertion) and correction (via 4-bp deletion) of the pathogenic HEXA 1278+TATC allele in HEK293T cells. Correction either to wild-type HEXA, or to HEXA containing a silent mutation that disrupts the PEgRNA PAM, is shown.

[0129] FIG. 43C is a graph showing the installation of the protective G127V variant in PRNP in HEK293T cells via G⋅C-to-T⋅A transversion. FIG. 43D is a graph showing prime editing in other human cell lines including K562 (leukemic bone marrow cells), U2OS (osteosarcoma cells), and HeLa (cervical cancer cells). FIG. 43E is a graph showing the installation of a G⋅C-to-T⋅A transversion mutation in DNMT1 of mouse primary cortical neurons using a dual split-intein PE3 lentivirus system, in which the N-terminal half is Cas9 (1-573) fused to N-intein and through a P2A self-cleaving peptide to GFP-KASH, and the C-terminal half is the C-intein fused to the remainder of PE2. PE2 halves are expressed from a human synapsin promoter that is highly specific for mature neurons. Sorted values reflect editing or indels from GFP-positive nuclei, while unsorted values are from all nuclei. FIG. 43F is a comparison of PE3 and Cas9-mediated HDR editing efficiencies at endogenous genomic loci in HEK293T cells. FIG. 43G is a comparison of PE3 and Cas9-mediated HDR editing efficiencies at endogenous genomic loci in K562, U2OS, and HeLa cells. FIG. 43H is a comparison of PE3 and Cas9-mediated HDR indel byproduct generation in HEK293T, K562, U2OS, and HeLa cells. FIG. 43I shows targeted insertion of a His6 tag (18 bp), FLAG epitope tag (24 bp), or extended LoxP site (44 bp) in HEK293T cells by PE3. All editing yields reflect the percentage of total sequencing reads that contain the intended edit and do not contain indels among all treated cells. Values and error bars reflect the mean and s.d. of three independent biological replicates.

[0130] FIGS. 44A-44G show in vitro prime editing validation studies with fluorescently labeled DNA substrates. FIG. 44A shows electrophoretic mobility shift assays with dCas9, 5′-extended PEgRNAs and 5′-Cy5-labeled DNA substrates. PEgRNAs 1 through 5 contain a 15-nt linker sequence (linker A for PEgRNA 1, linker B for PEgRNAs 2 through 5) between the spacer and the PBS, a 5-nt PBS sequence, and RT templates of 7 nt (PEgRNAs 1 and 2), 8 nt (PEgRNA 3), 15 nt (PEgRNA 4), and 22 nt (PEgRNA 5). PEgRNAs are those used in FIGS. 44E and 44F; full sequences are listed in Tables 2A-2C. FIG. 44B shows in vitro nicking assays of Cas9 H840A using 5′-extended and 3′-extended PEgRNAs. FIG. 44C shows Cas9-mediated indel formation in HEK293T cells at HEK3 using 5′-extended and 3′-extended PEgRNAs. FIG. 44D shows an overview of prime editing in vitro biochemical assays. 5′-Cy5-labeled pre-nicked and non-nicked dsDNA substrates were tested. sgRNAs, 5′-extended PEgRNAs, or 3′-extended PEgRNAs were pre-complexed with dCas9 or Cas9 H840A nickase, then combined with dsDNA substrate, M-MLV RT, and dNTPs. Reactions were allowed to proceed at 37° C. for 1 hour prior to separation by denaturing urea PAGE and visualization by Cy5 fluorescence. FIG. 44E shows primer extension reactions using 5′-extended PEgRNAs, pre-nicked DNA substrates, and dCas9 lead to significant conversion to RT products. FIG. 44F shows primer extension reactions using 5′-extended PEgRNAs as in FIG. 44B, with non-nicked DNA substrate and Cas9 H840A nickase. Product yields are greatly reduced by comparison to pre-nicked substrate. FIG. 44G shows an in vitro primer extension reaction using a 3′-PEgRNA generates a single apparent product by denaturing urea PAGE. The RT product band was excised, eluted from the gel, then subjected to homopolymer tailing with terminal transferase (TdT) using either dGTP or dATP. Tailed products were extended by poly-T or poly-C primers, and the resulting DNA was sequenced. Sanger traces indicate that three nucleotides derived from the gRNA scaffold were reverse transcribed (added as the final 3′ nucleotides to the DNA product). Note that in mammalian cell prime editing experiments, PEgRNA scaffold insertion is much rarer than in vitro (FIGS. 56A-56D), potentially due to the inability of the tethered reverse transcriptase to access the Cas9-bound guide RNA scaffold, and/or cellular excision of mismatched 3′ ends of 3′ flaps containing PEgRNA scaffold sequences.

[0131] FIGS. 45A-45G show cellular repair in yeast of 3′ DNA flaps from in vitro prime editing reactions. FIG. 45A shows that dual fluorescent protein reporter plasmids contain GFP and mCherry open reading frames separated by a target site encoding an in-frame stop codon, a +1 frameshift, or a −1 frameshift. Prime editing reactions were carried out in vitro with Cas9 H840A nickase, PEgRNA, dNTPs, and M-MLV reverse transcriptase, and then transformed into yeast. Colonies that contain unedited plasmids produce GFP but not mCherry. Yeast colonies containing edited plasmids produce both GFP and mCherry as a fusion protein. FIG. 45B shows an overlay of GFP and mCherry fluorescence for yeast colonies transformed with reporter plasmids containing a stop codon between GFP and mCherry (unedited negative control, top), or containing no stop codon or frameshift between GFP and mCherry (pre-edited positive control, bottom). FIGS. 45C-45F show a visualization of mCherry and GFP fluorescence from yeast colonies transformed with in vitro prime editing reaction products. FIG. 45C shows a stop codon correction via T⋅A-to-A⋅T transversion using a 3′-extended PEgRNA, or a 5′-extended PEgRNA, as shown in FIG. 45D. FIG. 45E shows a +1 frameshift correction via a 1-bp deletion using a 3′-extended PEgRNA. FIG. 45F shows a −1 frameshift correction via a 1-bp insertion using a 3′-extended PEgRNA. FIG. 45G shows Sanger DNA sequencing traces from plasmids isolated from GFP-only colonies in FIG. 45B and GFP and mCherry double-positive colonies in FIG. 45C.

[0132] FIGS. 46A-46F show correct editing versus indel generation with PE1. FIG. 46A shows T⋅A-to-A⋅T transversion editing efficiency and indel generation by PE1 at the +1 position of HEK3 using PEgRNAs containing 10-nt RT templates and a PBS sequences ranging from 8-17 nt. FIG. 46B shows G⋅C-to-T⋅A transversion editing efficiency and indel generation by PE1 at the +5 position of EMX1 using PEgRNAs containing 13-nt RT templates and a PBS sequences ranging from 9-17 nt. FIG. 46C shows G⋅C-to-T⋅A transversion editing efficiency and indel generation by PE1 at the +5 position of FANCF using PEgRNAs containing 17-nt RT templates and a PBS sequences ranging from 8-17 nt. FIG. 46D shows C⋅G-to-A⋅T transversion editing efficiency and indel generation by PE1 at the +1 position of RNF2 using PEgRNAs containing 11-nt RT templates and a PBS sequences ranging from 9-17 nt. FIG. 46E shows G⋅C-to-T⋅A transversion editing efficiency and indel generation by PE1 at the +2 position of HEK4 using PEgRNAs containing 13-nt RT templates and a PBS sequences ranging from 7-15 nt. FIG. 46F shows PE1-mediated+1 T deletion, +1 A insertion, and +1 CTT insertion at the HEK3 site using a 13-nt PBS and 10-nt RT template. Sequences of PEgRNAs are those used in FIG. 39C (see Tables 3A-3R). Values and error bars reflect the mean and s.d. of three independent biological replicates.

[0133] FIGS. 47A-47S show the evaluation of M-MLV RT variants for prime editing. FIG. 47A shows the abbreviations for prime editor variants used in this figure. FIG. 47B shows targeted insertion and deletion edits with PE1 at the HEK3 locus. FIGS. 47C-47H show a comparison of 18 prime editor constructs containing M-MLV RT variants for their ability to install a +2 G⋅C-to-C⋅G transversion edit at HEK3 as shown in FIG. 47C, a 24-bp FLAG insertion at HEK3 as shown in FIG. 47D, a +1 C⋅G-to-A⋅T transversion edit at RNF2 as shown in FIG. 47E, a +1 G⋅C-to-C⋅G transversion edit at EMX1 as shown in FIG. 47F, a +2 T⋅A-to-A⋅T transversion edit at HBB as shown in FIG. 47G, and a +1 G⋅C-to-C⋅G transversion edit at FANCF as shown in FIG. 47H. FIGS. 47I-47N show a comparison of four prime editor constructs containing M-MLV variants for their ability to install the edits shown in FIGS. 47C-47H in a second round of independent experiments. FIGS. 470-47S show PE2 editing efficiency at five genomic loci with varying PBS lengths. FIG. 47O shows a +1 T⋅A-to-A⋅T variation at HEK3. FIG. 47P shows a +5 G⋅C-to-T⋅A variation at EMX1.

[0134] FIG. 47Q shows a +5 G⋅C-to-T⋅A variation at FANCF. FIG. 47R shows a +1 C⋅G-to-A⋅T variation at RNF2. FIG. 47S shows a +2 G⋅C-to-T⋅A variation at HEK4. Values and error bars reflect the mean and s.d. of three independent biological replicates.

[0135] FIGS. 48A-48C show design features of PEgRNA PBS and RT template sequences. FIG. 48A shows PE2-mediated+5 G⋅C-to-T⋅A transversion editing efficiency (blue line) at VEGFA in HEK293T cells as a function of RT template length. Indels (gray line) are plotted for comparison. The sequence below the graph shows the last nucleotide templated for synthesis by the PEgRNA. G nucleotides (templated by a C in the PEgRNA) are highlighted; RT templates that end in C should be avoided during PEgRNA design to maximize prime editing efficiencies. FIG. 48B shows +5 G⋅C-to-T⋅A transversion editing and indels for DNMT1 as in FIG. 48A. FIG. 48C shows +5 G⋅C-to-T⋅A transversion editing and indels for RUNX1 as in FIG. 48A. Values and error bars reflect the mean and s.d. of three independent biological replicates.

[0136] FIGS. 49A-49B show the effects of PE2, PE2 R110S K103L, Cas9 H840A nickase, and dCas9 on cell viability. HEK293T cells were transfected with plasmids encoding PE2, PE2 R110S K103L, Cas9 H840A nickase, or dCas9, together with a HEK3-targeting PEgRNA plasmid. Cell viability was measured every 24 hours post-transfection for 3 days using the CellTiter-Glo 2.0 assay (Promega). FIG. 49A shows viability, as measured by luminescence, at 1, 2, or 3 days post-transfection. Values and error bars reflect the mean and s.e.m. of three independent biological replicates each performed in technical triplicate. FIG. 49B shows percent editing and indels for PE2, PE2 R110S K103L, Cas9 H840A nickase, or dCas9, together with a HEK3-targeting PEgRNA plasmid that encodes a +5 G to A edit. Editing efficiencies were measured on day 3 post-transfection from cells treated alongside of those used for assaying viability in FIG. 49A. Values and error bars reflect the mean and s.d. of three independent biological replicates.

[0137] FIGS. 50A-50B show PE3-mediated HBB E6V correction and HEXA 1278+TATC correction by various PEgRNAs. FIG. 50A shows a screen of 14 PEgRNAs for correction of the HBB E6V allele in HEK293T cells with PE3. All PEgRNAs evaluated convert the HBB E6V allele back to wild-type HBB without the introduction of any silent PAM mutation. FIG. 50B shows a screen of 41 PEgRNAs for correction of the HEXA 1278+TATC allele in HEK293T cells with PE3 or PE3b. Those PEgRNAs labeled HEXAs correct the pathogenic allele by a shifted 4-bp deletion that disrupts the PAM and leaves a silent mutation. Those PEgRNAs labeled HEXA correct the pathogenic allele back to wild-type. Entries ending in “b” use an edit-specific nicking sgRNA in combination with the PEgRNA (the PE3b system). Values and error bars reflect the mean and s.d. of three independent biological replicates.

[0138] FIGS. 51A-51G show a PE3 activity in human cell lines and a comparison of PE3 and Cas9-initiated HDR. Efficiency of generating the correct edit (without indels) and indel frequency for PE3 and Cas9-initiated HDR in HEK293T cells as shown in FIG. 51A, K562 cells as shown in FIG. 51B, U2OS cells as shown in FIG. 51C, and HeLa cells as shown in FIG. 51D. Each bracketed editing comparison installs identical edits with PE3 and Cas9-initiated HDR. Non-targeting controls are PE3 and a PEgRNA that targets a non-target locus.

[0139] FIG. 51E shows control experiments with non-targeting PEgRNA+PE3, and with dCas9+sgRNA, compared with wild-type Cas9 HDR experiments confirming that ssDNA donor HDR template, a common contaminant that artificially elevates apparent HDR efficiencies, does not contribute to the HDR measurements in FIGS. 51A-51D. FIGS. 51F-51G show example HEK3 site allele tables from genomic DNA samples isolated from K562 cells after editing with PE3 or with Cas9-initiated HDR. Alleles were sequenced on an Illumina MiSeq and analyzed with CRISPResso2¹⁷⁸. The reference HEK3 sequence from this region is at the top. Allele tables are shown for a non-targeting PEgRNA negative control, a +1 CTT insertion at HEK3 using PE3, and a +1 CTT insertion at HEK3 using Cas9-initiated HDR. Allele frequencies and corresponding Illumina sequencing read counts are shown for each allele. All alleles observed with frequency ≥0.20% are shown. Values and error bars reflect the mean and s.d. of three independent biological replicates.

[0140] FIGS. 52A-52D show distribution by length of pathogenic insertions, duplications, deletions, and indels in the ClinVar database. The ClinVar variant summary was downloaded from NCBI Jul. 15, 2019. The lengths of reported insertions, deletions, and duplications were calculated using reference and alternate alleles, variant start and stop positions, or appropriate identifying information in the variant name. Variants that did not report any of the above information were excluded from the analysis. The lengths of reported indels (single variants that include both insertions and deletions relative to the reference genome) were calculated by determining the number of mismatches or gaps in the best pairwise alignment between the reference and alternate alleles.

[0141] FIGS. 53A-53E show FACS gating examples for GFP-positive cell sorting. Below are examples of original batch analysis files outlining the sorting strategy used for generating HEXA 1278+TATC and HBB E6V HEK293T cell lines. The image data was generated on a Sony LE-MA900 cytometer using Cell Sorter Software v. 3.0.5. Graphic 1 shows gating plots for cells that do not express GFP. Graphic 2 shows an example sort of P2A-GFP-expressing cells used for isolating the HBB E6V HEK293T cell lines. HEK293T cells were initially gated on population using FSC-A/BSC-A (Gate A), then sorted for singlets using FSC-A/FSC-H (Gate B). Live cells were sorted for by gating DAPI-negative cells (Gate C). Cells with GFP fluorescence levels that were above those of the negative-control cells were sorted for using EGFP as the fluorochrome (Gate D). FIG. 53A shows HEK293T cells (GFP-negative). FIG. 53B shows a representative plot of FACS gating for cells expressing PE2-P2A-GFP. FIG. 53C shows the genotypes for HEXA 1278+TATC homozygote HEK293T cells. FIGS. 53D-53E show allele tables for HBB E6V homozygote HEK293T cell lines.

[0142] FIG. 54 is a schematic which summarizes the PEgRNA cloning procedure.

[0143] FIGS. 55A-55G are schematics of PEgRNA designs. FIG. 55A shows a simple diagram of PEgRNA with domains labeled (left) and bound to nCas9 at a genomic site (right). FIG. 55B shows various types of modifications to PEgRNA which are anticipated to increase activity. FIG. 55C shows modifications to PEgRNA to increase transcription of longer RNAs via promoter choice and 5′, 3′ processing and termination. FIG. 55D shows the lengthening of the P1 system, which is an example of a scaffold modification. FIG. 55E shows that the incorporation of synthetic modifications within the template region, or elsewhere within the PEgRNA, could increase activity. FIG. 55F shows that a designed incorporation of minimal secondary structure within the template could prevent formation of longer, more inhibitory, secondary structure. FIG. 55G shows a split PEgRNA with a second template sequence anchored by an RNA element at the 3′ end of the PEgRNA (left). Incorporation of elements at the 5′ or 3′ ends of the PEgRNA could enhance RT binding.

[0144] FIGS. 56A-56D show the incorporation of PEgRNA scaffold sequence into target loci. HTS data were analyzed for PEgRNA scaffold sequence insertion as described in FIGS. 60A-60B. FIG. 56A shows an analysis for the EMX1 locus. Shown is the % of total sequencing reads containing one or more PEgRNA scaffold sequence nucleotides within an insertion adjacent to the RT template (left); the percentage of total sequencing reads containing a PEgRNA scaffold sequence insertion of the specified length (middle); and the cumulative total percentage of PEgRNA insertion up to and including the length specified on the X axis. FIG. 56B shows the same as FIG. 56A, but for FANCF. FIG. 56C shows the same as in FIG. 56A but for HEK3. FIG. 56D shows the same as FIG. 56A but for RNF2. Values and error bars reflect the mean and s.d. of three independent biological replicates.

[0145] FIGS. 57A-57I show the effects of PE2, PE2-dRT, and Cas9 H840A nickase on transcriptome-wide RNA abundance. Analysis of cellular RNA, depleted for ribosomal RNA, isolated from HEK293T cells expressing PE2, PE2-dRT, or Cas9 H840A nickase and a PRNP-targeting or HEXA-targeting PEgRNA. RNAs corresponding to 14,410 genes and 14,368 genes were detected in PRNP and HEXA samples, respectively. FIGS. 57A-57F show Volcano plot displaying the −log 10 FDR-adjusted p-value vs. log 2-fold change in transcript abundance for each RNA, comparing (FIG. 57A) PE2 vs. PE2-dRT with PRNP-targeting PEgRNA, (FIG. 57B) PE2 vs. Cas9 H840A with PRNP-targeting PEgRNA, (FIG. 57C) PE2-dRT vs. Cas9 H840A with PRNP-targeting PEgRNA, (FIG. 57D) PE2 vs. PE2-dRT with HEXA-targeting PEgRNA, (FIG. 57E) PE2 vs. Cas9 H840A with HEXA-targeting PEgRNA, (FIG. 57F) PE2-dRT vs. Cas9 H840A with HEXA-targeting PEgRNA. Red dots indicate genes that show ≥2-fold change in relative abundance that are statistically significant (FDR-adjusted p<0.05). FIGS. 57G-57I are Venn diagrams of upregulated and downregulated transcripts (≥2-fold change) comparing PRNP and HEXA samples for (FIG. 57G) PE2 vs PE2-dRT, (FIG. 57H) PE2 vs. Cas9 H840A, and (FIG. 57I) PE2-dRT vs. Cas9 H840A.

[0146] FIGS. 58A-58B show representative FACS gating for neuronal nuclei sorting. Nuclei were sequentially gated on the basis of DyeCycle Ruby signal, FSC/SSC ratio, SSC-Width/SSC-height ratio, and GFP/DyeCycle ratio.

[0147] FIGS. 59A-59G show the protocol for cloning 3′-extended PEgRNAs into mammalian U6 expression vectors by Golden Gate assembly. FIG. 59A shows the cloning overview. FIG. 59B shows ‘Step 1: Digest pU6-PEgRNA-GG-Vector plasmid (component 1)’. FIG. 59C shows ‘Steps 2 and 3: Order and anneal oligonucleotide parts (components 2, 3, and 4)’. FIG. 59D shows ‘Step 2.b.ii.: sgRNA scaffold phosphorylation (unnecessary if oligonucleotides were purchased phosphorylated)’. FIG. 59E shows ‘Step 4: PEgRNA assembly’. FIG. 59F shows ‘Steps 5 and 6: Transformation of assembled plasmids’. FIG. 59G shows a diagram summarizing the PEgRNA cloning protocol.

[0148] FIGS. 60A-60B show the Python script for quantifying PEgRNA scaffold integration. A custom python script was generated to characterize and quantify PEgRNA insertions at target genomic loci. The script iteratively matches text strings of increasing length taken from a reference sequence (guide RNA scaffold sequence) to the sequencing reads within fastq files, and counts the number of sequencing reads that match the search query. Each successive text string corresponds to an additional nucleotide of the guide RNA scaffold sequence. Exact length integrations and cumulative integrations up to a specified length were calculated in this manner. At the start of the reference sequence, 5 to 6 bases of the 3′ end of the new DNA strand synthesized by the reverse transcriptase are included to ensure alignment and accurate counting of short slices of the sgRNA.

[0149] FIG. 61 is a graph showing the percent of total sequencing reads with the specified edit for SaCas9(N580A)-MMLV RT HEK3+6 C>A. The values for the correct edits as well as indels are shown.

[0150] FIGS. 62A-62B show the importance of the protospacer for efficient installation of a desired edit at a precise location with prime editing. FIG. 62A is a graph showing the percent of total sequencing reads with target T⋅A base pairs converted to A⋅T for various HEK3 loci. FIG. 62B is a sequence analysis showing the same.

[0151] FIG. 63 is a graph showing SpCas9 PAM variants in PAM editing (N=3). The percent of total sequencing reads with the targeted PAM edit is shown for SpCas9(H840A)-VRQR-MMLV RT, where NGA >NTA, and for SpCas9(H840A)-VRER-MMLV RT, where NGCG >NTCG. The PEgRNA primer binding site (PBS) length, RT template (RT) length, and PE system used are listed.

[0152] FIGS. 64A-64F depict a schematic showing the introduction of various site-specific recombinase (SSR) targets into the genome using PE. FIG. 64A provides a general schematic of the insertion of a recombinase target sequence by a prime editor. FIG. 64B shows how a single SSR target inserted by PE can be used as a site for genomic integration of a DNA donor template. FIG. 64C shows how a tandem insertion of SSR target sites can be used to delete a portion of the genome. FIG. 64D shows how a tandem insertion of SSR target sites can be used to invert a portion of the genome. FIG. 64E shows how the insertion of two SSR target sites at two distal chromosomal regions can result in chromosomal translocation. FIG. 64F shows how the insertion of two different SSR target sites in the genome can be used to exchange a cassette from a DNA donor template. See Example 17 for further details.

[0153] FIG. 65 shows in 1) the PE-mediated synthesis of a SSR target site in a human cell genome and 2) the use of that SSR target site to integrate a DNA donor template comprising a GFP expression marker. Once successfully integrated, the GFP causes the cell to fluoresce. See Example 17 for further details.

[0154] FIG. 66 depicts one embodiment of a prime editor being provided as two PE half proteins which regenerate as whole prime editor through the self-splicing action of the split-intein halves located at the end or beginning of each of the prime editor half proteins.

[0155] FIGS. 67A-67B depict the mechanism of intein removal from a polypeptide sequence and the reformation of a peptide bond between the N-terminal and the C-terminal extein sequences. FIG. 67A depicts the general mechanism of two half proteins each containing half of an intein sequence, which when in contact within a cell result in a fully-functional intein which then undergoes self-spicing and excision. The process of excision results in the formation of a peptide bond between the N-terminal protein half (or the “N extein”) and the C-terminal protein half (or the “C extein”) to form a whole, single polypeptide comprising the N extein and the C extein portions. In various embodiments, the N extein may correspond to the N-terminal half of a split prime editor fusion protein and the C extein may correspond to the C-terminal half of a split prime editor. FIG. 67B shows a chemical mechanism of intein excision and the reformation of a peptide bond that joins the N extein half (the red-colored half) and the C extein half (the blue-colored half). Excision of the split inteins (i.e., the N intein and the C intein in the split intein configuration) may also be referred to as “trans splicing” as it involves the splicing action of two separate components provided in trans.

[0156] FIG. 68A demonstrates that delivery of both split intein halves of SpPE (SEQ ID NOs: 3875, 3876) at the linker maintains activity at three test loci when co-transfected into HEK293T cells.

[0157] FIG. 68B demonstrates that delivery of both split intein halves of SaPE2 (e.g., SEQ ID NO: 443 and SEQ ID NO: 450) recapitulate activity of full length SaPE2 (SEQ ID NO: 134) when co-transfected into HEK293T cells. Residues indicated in quotes are the sequence of amino acids 741-743 in SaCas9 (first residues of the C-terminal extein) which are important for the intein trans splicing reaction. ‘SMP’ are the native residues, which we also mutated to the ‘CFN’ consensus splicing sequence. The consensus sequence is shown to yield the highest reconstitution as measured by prime editing percentage.

[0158] FIG. 68C provides data showing that various disclosed PE ribonucleoprotein complexes (PE2 at high concentration, PE3 at high concentration and PE3 at low concentration) can be delivered in this manner.

[0159] FIG. 69 shows a bacteriophage plaque assay to determine PE effectiveness in PANCE. Plaques (dark circles) indicate phage able to successfully infect E. coli. Increasing concentration of L-rhamnose results in increased expression of PE and an increase in plaque formation. Sequencing of plaques revealed the presence of the PE-installed genomic edit.

[0160] FIGS. 70A-70I provide an example of an edited target sequence as an illustration of a step-by-step instruction for designing PEgRNAs and nicking-sgRNAs for prime editing. FIG. 70A: Step 1. Define the target sequence and the edit. Retrieve the sequence of the target DNA region (˜200 bp) centered around the location of the desired edit (point mutation, insertion, deletion, or combination thereof). FIG. 70B: Step 2. Locate target PAMs. Identify PAMs in proximity to the edit location. Be sure to look for PAMs on both strands. While PAMs close to the edit position are preferred, it is possible to install edits using protospacers and PAMs that place the nick ≥30 nt from the edit position. FIG. 70C: Step 3. Locate the nick sites. For each PAM being considered, identify the corresponding nick site. For Sp Cas9 H840A nickase, cleavage occurs in the PAM-containing strand between the 3^{rd} and 40 bases 5′ to the NGG PAM. All edited nucleotides must exist 3′ of the nick site, so appropriate PAMs must place the nick 5′ to the target edit on the PAM-containing strand. In the example shown below, there are two possible PAMs. For simplicity, the remaining steps will demonstrate the design of a PEgRNA using PAM 1 only. FIG. 70D: Step 4. Design the spacer sequence. The protospacer of Sp Cas9 corresponds to the 20 nucleotides 5′ to the NGG PAM on the PAM-containing strand. Efficient Pol III transcription initiation requires a G to be the first transcribed nucleotide. If the first nucleotide of the protospacer is a G, the spacer sequence for the PEgRNA is simply the protospacer sequence. If the first nucleotide of the protospacer is not a G, the spacer sequence of the PEgRNA is G followed by the protospacer sequence. FIG. 70E: Step 5. Design a primer binding site (PBS). Using the starting allele sequence, identify the DNA primer on the PAM-containing strand. The 3′ end of the DNA primer is the nucleotide just upstream of the nick site (i.e. the 4^{th} base 5′ to the NGG PAM for Sp Cas9). As a general design principle for use with PE2 and PE3, a PEgRNA primer binding site (PBS) containing 12 to 13 nucleotides of complementarity to the DNA primer can be used for sequences that contain ˜40-60% GC content. For sequences with low GC content, longer (14- to 15-nt) PBSs should be tested. For sequences with higher GC content, shorter (8- to 11-nt) PBSs should be tested. Optimal PBS sequences should be determined empirically, regardless of GC content. To design a length-p PBS sequence, take the reverse complement of the first p nucleotides 5′ of the nick site in the PAM-containing strand using the starting allele sequence. FIG. 70F: Step 6. Design an RT template. The RT template encodes the designed edit and homology to the sequence adjacent to the edit. Optimal RT template lengths vary based on the target site. For short-range edits (positions +1 to +6), it is recommended to test a short (9 to 12 nt), a medium (13 to 16 nt), and a long (17 to 20 nt) RT template. For long-range edits (positions +7 and beyond), it is recommended to use RT templates that extend at least 5 nt (preferably 10 or more nt) past the position of the edit to allow for sufficient 3′ DNA flap homology. For long-range edits, several RT templates should be screened to identify functional designs. For larger insertions and deletions (≥5 nt), incorporation of greater 3′ homology (˜20 nt or more) into the RT template is recommended. Editing efficiency is typically impaired when the RT template encodes the synthesis of a G as the last nucleotide in the reverse transcribed DNA product (corresponding to a C in the RT template of the PEgRNA). As many RT templates support efficient prime editing, avoidance of G as the final synthesized nucleotide is recommended when designing RT templates. To design a length-r RT template sequence, use the desired allele sequence and take the reverse complement of the first r nucleotides 3′ of the nick site in the strand that originally contained the PAM. Note that compared to SNP edits, insertion or deletion edits using RT templates of the same length will not contain identical homology. FIG. 70G: Step 7. Assemble the full PEgRNA sequence. Concatenate the PEgRNA components in the following order (5′ to 3′): spacer, scaffold, RT template and PBS. FIG. 70H: Step 8. Designing nicking-sgRNAs for PE3. Identify PAMs on the non-edited strand upstream and downstream of the edit. Optimal nicking positions are highly locus-dependent and should be determined empirically. In general, nicks placed 40 to 90 nucleotides 5′ to the position across from the PEgRNA-induced nick lead to higher editing yields and fewer indels. A nicking sgRNA has a spacer sequence that matches the 20-nt protospacer in the starting allele, with the addition of a 5′-G if the protospacer does not begin with a G. FIG. 70I: Step 9. Designing PE3b nicking-sgRNAs. If a PAM exists in the complementary strand and its corresponding protospacer overlaps with the sequence targeted for editing, this edit could be a candidate for the PE3b system. In the PE3b system, the spacer sequence of the nicking-sgRNA matches the sequence of the desired edited allele, but not the starting allele. The PE3b system operates efficiently when the edited nucleotide(s) falls within the seed region (˜10 nt adjacent to the PAM) of the nicking-sgRNA protospacer. This prevents nicking of the complementary strand until after installation of the edited strand, preventing competition between the PEgRNA and the sgRNA for binding the target DNA. PE3b also avoids the generation of simultaneous nicks on both strands, thus reducing indel formation significantly while maintaining high editing efficiency. PE3b sgRNAs should have a spacer sequence that matches the 20-nt protospacer in the desired allele, with the addition of a 5′ G if needed.

[0161] FIG. 71A shows the nucleotide sequence of a SpCas9 PEgRNA molecule (top) which terminates at the 3′ end in a “UUU” and does not contain a toeloop element. The lower portion of the figure depicts the same SpCas9 PEgRNA molecule but is further modified to contain a toeloop element having the sequence 5′-“GAAANNNNN”-3′ inserted immediately before the “UUU” 3′ end. The “N” can be any nucleobase.

[0162] FIG. 71B shows the results of Example 18, which demonstrates that the efficiency of prime editing in HEK cells or EMX cells is increased using PEgRNA containing toeloop elements, whereas the percent of indel formation is largely unchanged.

[0163] FIGS. 72A-72C depict alternative PEgRNA configurations that can be used in prime editing. FIG. 72A depicts the PE2:PEgRNA embodiment of prime editing. This embodiment involves a PE2 (a fusion protein comprising a Cas9 and a reverse transcriptase) complexed with a PEgRNA (as also described in FIGS. 1A-1I and/or FIGS. 3A-3E). In this embodiment, the template for reverse transcription is incorporated into a 3′ extension arm on the sgRNA to make the PEgRNA, and the DNA polymerase enzyme is a reverse transcriptase (RT) fused directly to Cas9. FIG. 72B depicts the MS2cp-PE2:sgRNA+tPERT embodiment. This embodiment comprises a PE2 fusion (Cas9+a reverse transcriptase) that is further fused to the MS2 bacteriophage coat protein (MS2cp) to form the MS2cp-PE2 fusion protein. To achieve prime editing, the MS2cp-PE2 fusion protein is complexed with an sgRNA that targets the complex to a specific target site in the DNA. The embodiment then involves the introduction of a trans prime editing RNA template (“tPERT”), which operates in place of a PEgRNA by providing a primer binding site (PBS) and an DNA synthesis template on separate molecule, i.e., the tPERT, which is also equipped with a MS2 aptamer (stem loop). The MS2cp protein recruits the tPERT by binding to the MS2 aptamer of the molecule. FIG. 72C depicts alternative designs for PEgRNAs that can be achieved through known methods for chemical synthesis of nucleic acid molecules. For example, chemical synthesis can be used to synthesize a hybrid RNA/DNA PEgRNA molecule for use in prime editing, wherein the extension arm of the hybrid PEgRNA is DNA instead of RNA. In such an embodiment, a DNA-dependent DNA polymerase can be used in place of a reverse transcriptase to synthesize the 3′ DNA flap comprising the desired genetic change that is formed by prime editing. In another embodiment, the extension arm can be synthesized to include a chemical linker that prevents the DNA polymerase (e.g., a reverse transcriptase) from using the sgRNA scaffold or backbone as a template. In still another embodiment, the extension arm may comprise a DNA synthesis template that has the reverse orientation relative to the overall orientation of the PEgRNA molecule. For example, and as shown for a PEgRNA in the 5′-to-3′ orientation and with an extension attached to the 3′ end of the sgRNA scaffold, the DNA synthesis template is orientated in the opposite direction, i.e., the 3′-to-5′ direction. This embodiment may be advantageous for PEgRNA embodiments with extension arms positioned at the 3′ end of a gRNA. By reverse the orientation of the extension arm, the DNA synthesis by the polymerase (e.g., reverse transcriptase) will terminate once it reaches the newly orientated 5′ of the extension arm and will thus, not risk using the gRNA core as a template.

[0164] FIG. 73 demonstrates prime editing with tPERTs and the MS2 recruitment system (aka MS2 tagging technique). An sgRNA targeting the prime editor protein (PE2) to the target locus is expressed in combination with a tPERT containing a primer binding site (a13-nt or 17-nt PBS), an RT template encoding a His6 tag insertion and a homology arm, and an MS2 aptamer (located at the 5′ or 3′ end of the tPERT molecule). Either prime editor protein (PE2) or a fusion of the MS2cp to the N-terminus of PE2 was used. Editing was carried out with or without a complementary-strand nicking sgRNA, as in the previously developed PE3 system (designated in the x-axis as labels “PE2+nick” or “PE2”, respectively). This is also referred to and defined herein as “second-strand nicking.”

[0165] FIG. 74 demonstrates that the MS2 aptamer expression of the reverse transcriptase in trans and its recruitment with the MS2 aptamer system. The PEgRNAPEgRNA contains the MS2 RNA aptamer inserted into either one of two sgRNA scaffold hairpins. The wild-type M-MLV reverse transcriptase is expressed as an N-terminal or C-terminal fusion to the MS2 coat protein (MCP). Editing is at the HEK3 site in HEK293T cells.

[0166] FIG. 75 provides a bar graph comparing the efficiency (i.e., “% of total sequencing reads with the specified edit or indels”) of PE2, PE2-trunc, PE3, and PE3-trunc over different target sites in various cell lines. The data shows that the prime editors comprising the truncated RT variants were about as efficient as the prime editors comprising the non-truncated RT proteins.

[0167] FIG. 76 demonstrates the editing efficiency of intein-split prime editors fo Example 20. HEK239T cells were transfected with plasmids encoding full-length PE2 or intein-split PE2, PEgRNA and nicking guide RNA. Consensus sequence (most amino-terminal residues of C terminal extein) are indicated. Percent editing at two sites in shown: HEK3+1 CTT insertion and PRNP+6 G to T. Replicate n=3 independent transfections. See Example 20.

[0168] FIG. 77 demonstrates the editing efficiency of intein-split prime editors fo Example 20. Editing assessed by targeted deep sequencing in bulk cortex and GFP+subpopulation upon delivery of 5E10vg per SpPE3 half and a small amount 1E10 of nuclear-localized GFP:KASH to P0 mice by ICV injection. Editors and GFP were packaged in AAV9 with EFS promoter. Mice were harvested three weeks post injection and GFP+nuclei were isolated by flow cytometry. Individual data points are shown, with 1-2 mice per condition analyzed. See Example 20.

[0169] FIG. 78 demonstrates the editing efficiency of intein-split prime editors of Example 20. Specifically, the figures depicts the AAV split-SpPE3 constructs using in Example 20. Co-transduction by AAV particles separately expressing SpPE3-N and SpPE3-C recapitulates PE3 activity. Note N-terminal genome contains a U6-sgRNA cassette expressing the nicking sgRNA, and the C-terminal genome contains a U6-PEgRNA cassette expressing the PEgRNA. See Example 20.

[0170] FIG. 79 shows the editing efficiency of certain optimized linkers as discussed in Example 21. In particular, the data shows the editing efficiency of the PE2 construct with the current linker (noted as PE2—white box) compared to various versions with the linker replaced with a sequence as indicated at the HEK3, EMX1, FANCF, RNF2 loci for representative PEgRNAs for transition, transversion, insertion, and deletion edits. The replacement linkers are referred to as “1×SGGS” (SEQ ID NO: 174), “2×SGGS” (SEQ ID NO: 446), “3×SGGS” (SEQ ID NO: 3889), “1×XTEN” (SEQ ID NO: 171), “no linker”, “1×Gly”, “1×Pro”, “1×EAAAK” (SEQ ID NO: 3968), “2×EAAAK”” (SEQ ID NO: 3969), and “3×EAAAK” (SEQ ID NO: 3970). The editing efficiency is measured in bar graph format relative to the “control” editing efficiency of PE2. The linker of PE2 is SGGSSGGSSGSETPGTSESATPESSGGSSGGSS (SEQ ID NO: 127). All editing was done in the context of the PE3 system, i.e., which refers the PE2 editing construct plus the addition of the optimal secondary sgRNA nicking guide. See Example 21.

[0171] FIG. 80. Taking the average fold efficacy relative to PE2 yields the graph shown, indicating that use of a 1×XTEN (SEQ ID NO: 171) linker sequence improves editing efficiency by 1.14 fold on average (n=15). See Example 21.

[0172] FIG. 81 depicts the transcription level of PEgRNAs from different promoters, as described in Example 22.

[0173] FIG. 82 As depicted in Example 22, impact of different types of modifications on PEgRNA structure on editing efficiency relative to unmodified PEgRNA.

[0174] FIG. 83 Depicts a PE experiment that targeted editing of the HEK3 gene, specifically targeting the insertion of a 10 nt insertion at position +1 relative to the nick site and using PE3. See Example 22.

[0175] FIG. 84A depicts an exemplary PEgRNA having a spacer, gRNA core, and an extension arm (RT template+primer binding site), which is modified at the 3′ end of the PEgRNA with a tRNA molecule, coupled through a UCU linker. The tRNA includes various post-transcriptional modifications. Said modification are not required, however.

[0176] FIG. 84B depicts structure of tRNA that can be used to modify PEgRNA structures. See Example 22. The P1 can be variable in length. The P1 can be extended to help prevent RNAseP processing of the PEgRNA-tRNA fusion.

[0177] FIG. 85 depicts a PE experiment that targeted editing of the FANCF gene, specifically targeting a G-to-T conversion at position +5 relative to the nick site and using PE3 construct. See Example 22.

[0178] FIG. 86 depicts a PE experiment that targeted editing of the HEK3 gene, specifically targeting the insertion of a 71 nt FLAG tag insertion at position +1 relative to the nick site and using PE3 construct. See Example 22.

[0179] FIG. 87 results from a screen in N2A cells where the pegRNA installs 1412Adel, with details about the primer binding site (PBS) length and reverse transcriptase (RT) template length. (Shown with and without indels). See Example 23.

[0180] FIG. 88 results from a screen in N2A cells where the pegRNA installs 1412Adel, with details about the primer binding site (PBS) length and reverse transcriptase (RT) template length. (Shown with and without indels). See Example 23.

[0181] FIG. 89 depicts results of editing at a proxy locus in the β-globin gene and at HEK3 in healthy HSCs, varying the concentration of editor to pegRNA and nicking gRNA. See Example 23.

### DEFINITIONS

[0182] Unless defined otherwise, all technical and scientific terms used herein have the meaning commonly understood by a person skilled in the art to which this invention belongs. The following references provide one of skill with a general definition of many of the terms used in this invention: Singleton et al., Dictionary of Microbiology and Molecular Biology (2nd ed. 1994); The Cambridge Dictionary of Science and Technology (Walker ed., 1988); The Glossary of Genetics, 5th Ed., R. Rieger et al. (eds.), Springer Verlag (1991); and Hale & Marham, The Harper Collins Dictionary of Biology (1991). As used herein, the following terms have the meanings ascribed to them unless specified otherwise.

### Antisense Strand

[0183] In genetics, the “antisense” strand of a segment within double-stranded DNA is the template strand, and which is considered to run in the 3′ to 5′ orientation. By contrast, the “sense” strand is the segment within double-stranded DNA that runs from 5′ to 3′, and which is complementary to the antisense strand of DNA, or template strand, which runs from 3′ to 5′. In the case of a DNA segment that encodes a protein, the sense strand is the strand of DNA that has the same sequence as the mRNA, which takes the antisense strand as its template during transcription, and eventually undergoes (typically, not always) translation into a protein. The antisense strand is thus responsible for the RNA that is later translated to protein, while the sense strand possesses a nearly identical makeup to that of the mRNA. Note that for each segment of dsDNA, there will possibly be two sets of sense and antisense, depending on which direction one reads (since sense and antisense is relative to perspective). It is ultimately the gene product, or mRNA, that dictates which strand of one segment of dsDNA is referred to as sense or antisense.

### Bi-Specific Ligand

[0184] The term “bi-specific ligand” or “bi-specific moiety,” as used herein, refers to a ligand that binds to two different ligand-binding domains. In certain embodiments, the ligand is a small molecule compound, or a peptide, or a polypeptide. In other embodiments, ligand-binding domain is a “dimerization domain,” which can be install as a peptide tag onto a protein. In various embodiments, two proteins each comprising the same or different dimerization domains can be induced to dimerize through the binding of each dimerization domain to the bi-specific ligand. As used herein, “bi-specific ligands” may be equivalently refer to “chemical inducers of dimerization” or “CIDs”.

### Cas9

[0185] The term “Cas9” or “Cas9 nuclease” refers to an RNA-guided nuclease comprising a Cas9 domain, or a fragment thereof (e.g., a protein comprising an active or inactive DNA cleavage domain of Cas9, and/or the gRNA binding domain of Cas9). A “Cas9 domain” as used herein, is a protein fragment comprising an active or inactive cleavage domain of Cas9 and/or the gRNA binding domain of Cas9. A “Cas9 protein” is a full length Cas9 protein. A Cas9 nuclease is also referred to sometimes as a casn1 nuclease or a CRISPR (Clustered Regularly Interspaced Short Palindromic Repeat)-associated nuclease. CRISPR is an adaptive immune system that provides protection against mobile genetic elements (viruses, transposable elements, and conjugative plasmids). CRISPR clusters contain spacers, sequences complementary to antecedent mobile elements, and target invading nucleic acids. CRISPR clusters are transcribed and processed into CRISPR RNA (crRNA). In type II CRISPR systems correct processing of pre-crRNA requires a trans-encoded small RNA (tracrRNA), endogenous ribonuclease 3 (mc) and a Cas9 domain. The tracrRNA serves as a guide for ribonuclease 3-aided processing of pre-crRNA. Subsequently, Cas9/crRNA/tracrRNA endonucleolytically cleaves linear or circular dsDNA target complementary to the spacer. The target strand not complementary to crRNA is first cut endonucleolytically, then trimmed 3′-5′ exonucleolytically. In nature, DNA-binding and cleavage typically requires protein and both RNAs. However, single guide RNAs (“sgRNA”, or simply “gNRA”) can be engineered so as to incorporate aspects of both the crRNA and tracrRNA into a single RNA species. See, e.g., Jinek M., Chylinski K., Fonfara I., Hauer M., Doudna J. A., Charpentier E. Science 337:816-821(2012), the entire contents of which are hereby incorporated by reference. Cas9 recognizes a short motif in the CRISPR repeat sequences (the PAM or protospacer adjacent motif) to help distinguish self versus non-self. Cas9 nuclease sequences and structures are well known to those of skill in the art (see, e.g., “Complete genome sequence of an M1 strain of Streptococcus pyogenes.” Ferretti et al., J. J., McShan W. M., Ajdic D. J., Savic D. J., Savic G., Lyon K., Primeaux C., Sezate S., Suvorov A. N., Kenton S., Lai H. S., Lin S. P., Qian Y., Jia H. G., Najar F. Z., Ren Q., Zhu H., Song L., White J., Yuan X., Clifton S. W., Roe B. A., McLaughlin R. E., Proc. Natl. Acad. Sci. U.S.A. 98:4658-4663(2001); “CRISPR RNA maturation by trans-encoded small RNA and host factor RNase III.” Deltcheva E., Chylinski K., Sharma C. M., Gonzales K., Chao Y., Pirzada Z. A., Eckert M. R., Vogel J., Charpentier E., Nature 471:602-607(2011); and “A programmable dual-RNA-guided DNA endonuclease in adaptive bacterial immunity.” Jinek M., Chylinski K., Fonfara I., Hauer M., Doudna J. A., Charpentier E. Science 337:816-821(2012), the entire contents of each of which are incorporated herein by reference). Cas9 orthologs have been described in various species, including, but not limited to, S. pyogenes and S. thermophilus. Additional suitable Cas9 nucleases and sequences will be apparent to those of skill in the art based on this disclosure, and such Cas9 nucleases and sequences include Cas9 sequences from the organisms and loci disclosed in Chylinski, Rhun, and Charpentier, “The tracrRNA and Cas9 families of type II CRISPR-Cas immunity systems” (2013) RNA Biology 10:5, 726-737; the entire contents of which are incorporated herein by reference. In some embodiments, a Cas9 nuclease comprises one or more mutations that partially impair or inactivate the DNA cleavage domain.

[0186] A nuclease-inactivated Cas9 domain may interchangeably be referred to as a “dCas9” protein (for nuclease-“dead” Cas9). Methods for generating a Cas9 domain (or a fragment thereof) having an inactive DNA cleavage domain are known (see, e.g., Jinek et al., Science. 337:816-821(2012); Qi et al., “Repurposing CRISPR as an RNA-Guided Platform for Sequence-Specific Control of Gene Expression” (2013) Cell. 28; 152(5):1173-83, the entire contents of each of which are incorporated herein by reference). For example, the DNA cleavage domain of Cas9 is known to include two subdomains, the HNH nuclease subdomain and the RuvC1 subdomain. The HNH subdomain cleaves the strand complementary to the gRNA, whereas the RuvC1 subdomain cleaves the non-complementary strand. Mutations within these subdomains can silence the nuclease activity of Cas9. For example, the mutations D10A and H840A completely inactivate the nuclease activity of S. pyogenes Cas9 (Jinek et al., Science. 337:816-821(2012); Qi et al., Cell. 28; 152(5):1173-83 (2013)). In some embodiments, proteins comprising fragments of Cas9 are provided. For example, in some embodiments, a protein comprises one of two Cas9 domains: (1) the gRNA binding domain of Cas9; or (2) the DNA cleavage domain of Cas9. In some embodiments, proteins comprising Cas9 or fragments thereof are referred to as “Cas9 variants.” A Cas9 variant shares homology to Cas9, or a fragment thereof. For example, a Cas9 variant is at least about 70% identical, at least about 80% identical, at least about 90% identical, at least about 95% identical, at least about 96% identical, at least about 97% identical, at least about 98% identical, at least about 99% identical, at least about 99.5% identical, at least about 99.8% identical, or at least about 99.9% identical to wild type Cas9 (e.g., SpCas9 of SEQ ID NO: 18). In some embodiments, the Cas9 variant may have 1, 2, 3, 4, 5, 6, 7, 8, 9, 10, 11, 12, 13, 14, 15, 16, 17, 18, 19, 20, 21, 22, 21, 24, 25, 26, 27, 28, 29, 30, 31, 32, 33, 34, 35, 36, 37, 38, 39, 40, 41, 42, 43, 44, 45, 46, 47, 48, 49, 50, or more amino acid changes compared to wild type Cas9 (e.g., SpCas9 of SEQ ID NO: 18). In some embodiments, the Cas9 variant comprises a fragment of SEQ ID NO: 18 Cas9 (e.g., a gRNA binding domain or a DNA-cleavage domain), such that the fragment is at least about 70% identical, at least about 80% identical, at least about 90% identical, at least about 95% identical, at least about 96% identical, at least about 97% identical, at least about 98% identical, at least about 99% identical, at least about 99.5% identical, or at least about 99.9% identical to the corresponding fragment of wild type Cas9 (e.g., SpCas9 of SEQ ID NO: 18). In some embodiments, the fragment is at least 30%, at least 35%, at least 40%, at least 45%, at least 50%, at least 55%, at least 60%, at least 65%, at least 70%, at least 75%, at least 80%, at least 85%, at least 90%, at least 95% identical, at least 96%, at least 97%, at least 98%, at least 99%, or at least 99.5% of the amino acid length of a corresponding wild type Cas9 (e.g., SpCas9 of SEQ ID NO: 18).

cDNA

[0187] The term “cDNA” refers to a strand of DNA copied from an RNA template. cDNA is complementary to the RNA template.

### Circular Permutant

[0188] As used herein, the term “circular permutant” refers to a protein or polypeptide (e.g., a Cas9) comprising a circular permutation, which is change in the protein's structural configuration involving a change in order of amino acids appearing in the protein's amino acid sequence. In other words, circular permutants are proteins that have altered N- and C-termini as compared to a wild-type counterpart, e.g., the wild-type C-terminal half of a protein becomes the new N-terminal half. Circular permutation (or CP) is essentially the topological rearrangement of a protein's primary sequence, connecting its N- and C-terminus, often with a peptide linker, while concurrently splitting its sequence at a different position to create new, adjacent N- and C-termini. The result is a protein structure with different connectivity, but which often can have the same overall similar three-dimensional (3D) shape, and possibly include improved or altered characteristics, including, reduced proteolytic susceptibility, improved catalytic activity, altered substrate or ligand binding, and/or improved thermostability. Circular permutant proteins can occur in nature (e.g., concanavalin A and lectin). In addition, circular permutation can occur as a result of posttranslational modifications or may be engineered using recombinant techniques.

### Circularly Permuted Cas9

[0189] The term “circularly permuted Cas9” refers to any Cas9 protein, or variant thereof, that has been occurs as a circular permutant, whereby its N- and C-termini have been topically rearranged. Such circularly permuted Cas9 proteins (“CP-Cas9”), or variants thereof, retain the ability to bind DNA when complexed with a guide RNA (gRNA). See, Oakes et al., “Protein Engineering of Cas9 for enhanced function,” Methods Enzymol, 2014, 546: 491-511 and Oakes et al., “CRISPR-Cas9 Circular Permutants as Programmable Scaffolds for Genome Modification,” Cell, Jan. 10, 2019, 176: 254-267, each of are incorporated herein by reference. The instant disclosure contemplates any previously known CP-Cas9 or use a new CP-Cas9 so long as the resulting circularly permuted protein retains the ability to bind DNA when complexed with a guide RNA (gRNA). Exemplary CP-Cas9 proteins are SEQ ID NOs: 77-86.

### CRISPR

[0190] CRISPR is a family of DNA sequences (i.e., CRISPR clusters) in bacteria and archaea that represent snippets of prior infections by a virus that have invaded the prokaryote. The snippets of DNA are used by the prokaryotic cell to detect and destroy DNA from subsequent attacks by similar viruses and effectively compose, along with an array of CRISPR-associated proteins (including Cas9 and homologs thereof) and CRISPR-associated RNA, a prokaryotic immune defense system. In nature, CRISPR clusters are transcribed and processed into CRISPR RNA (crRNA). In certain types of CRISPR systems (e.g., type II CRISPR systems), correct processing of pre-crRNA requires a trans-encoded small RNA (tracrRNA), endogenous ribonuclease 3 (mc) and a Cas9 protein. The tracrRNA serves as a guide for ribonuclease 3-aided processing of pre-crRNA. Subsequently, Cas9/crRNA/tracrRNA endonucleolytically cleaves linear or circular dsDNA target complementary to the RNA. Specifically, the target strand not complementary to crRNA is first cut endonucleolytically, then trimmed 3′-5′ exonucleolytically. In nature, DNA-binding and cleavage typically requires protein and both RNAs. However, single guide RNAs (“sgRNA”, or simply “gNRA”) can be engineered so as to incorporate aspects of both the crRNA and tracrRNA into a single RNA species—the guide RNA. See, e.g., Jinek M., Chylinski K., Fonfara I., Hauer M., Doudna J. A., Charpentier E. Science 337:816-821(2012), the entire contents of which is hereby incorporated by reference. Cas9 recognizes a short motif in the CRISPR repeat sequences (the PAM or protospacer adjacent motif) to help distinguish self versus non-self. CRISPR biology, as well as Cas9 nuclease sequences and structures are well known to those of skill in the art (see, e.g., “Complete genome sequence of an M1 strain of Streptococcus pyogenes.” Ferretti et al., J. J., McShan W. M., Ajdic D. J., Savic D. J., Savic G., Lyon K., Primeaux C., Sezate S., Suvorov A. N., Kenton S., Lai H. S., Lin S. P., Qian Y., Jia H. G., Najar F. Z., Ren Q., Zhu H., Song L., White J., Yuan X., Clifton S. W., Roe B. A., McLaughlin R. E., Proc. Natl. Acad. Sci. U.S.A. 98:4658-4663(2001); “CRISPR RNA maturation by trans-encoded small RNA and host factor RNase III.” Deltcheva E., Chylinski K., Sharma C. M., Gonzales K., Chao Y., Pirzada Z. A., Eckert M. R., Vogel J., Charpentier E., Nature 471:602-607(2011); and “A programmable dual-RNA-guided DNA endonuclease in adaptive bacterial immunity.” Jinek M., Chylinski K., Fonfara I., Hauer M., Doudna J. A., Charpentier E. Science 337:816-821(2012), the entire contents of each of which are incorporated herein by reference). Cas9 orthologs have been described in various species, including, but not limited to, S. pyogenes and S. thermophilus. Additional suitable Cas9 nucleases and sequences will be apparent to those of skill in the art based on this disclosure, and such Cas9 nucleases and sequences include Cas9 sequences from the organisms and loci disclosed in Chylinski, Rhun, and Charpentier, “The tracrRNA and Cas9 families of type II CRISPR-Cas immunity systems” (2013) RNA Biology 10:5, 726-737; the entire contents of which are incorporated herein by reference.

[0191] In certain types of CRISPR systems (e.g., type II CRISPR systems), correct processing of pre-crRNA requires a trans-encoded small RNA (tracrRNA), endogenous ribonuclease 3 (mc), and a Cas9 protein. The tracrRNA serves as a guide for ribonuclease 3-aided processing of pre-crRNA. Subsequently, Cas9/crRNA/tracrRNA endonucleolytically cleaves linear or circular nucleic acid target complementary to the RNA. Specifically, the target strand not complementary to crRNA is first cut endonucleolytically, then trimmed 3′-5′ exonucleolytically. In nature, DNA-binding and cleavage typically requires protein and both RNAs. However, single guide RNAs (“sgRNA”, or simply “gRNA”) can be engineered so as to incorporate embodiments of both the crRNA and tracrRNA into a single RNA species the guide RNA.

[0192] In general, a “CRISPR system” refers collectively to transcripts and other elements involved in the expression of or directing the activity of CRISPR-associated (“Cas”) genes, including sequences encoding a Cas gene, a tracr (trans-activating CRISPR) sequence (e.g. tracrRNA or an active partial tracrRNA), a tracr mate sequence (encompassing a “direct repeat” and a tracrRNA-processed partial direct repeat in the context of an endogenous CRISPR system), a guide sequence (also referred to as a “spacer” in the context of an endogenous CRISPR system), or other sequences and transcripts from a CRISPR locus. The tracrRNA of the system is complementary (fully or partially) to the tracr mate sequence present on the guide RNA.

### DNA Synthesis Template

[0193] As used herein, the term “DNA synthesis template” refers to the region or portion of the extension arm of a PEgRNA that is utilized as a template strand by a polymerase of a prime editor to encode a 3′ single-strand DNA flap that contains the desired edit and which then, through the mechanism of prime editing, replaces the corresponding endogenous strand of DNA at the target site. In various embodiments, the DNA synthesis template is shown in FIG. 3A (in the context of a PEgRNA comprising a 5′ extension arm), FIG. 3B (in the context of a PEgRNA comprising a 3′ extension arm), FIG. 3C (in the context of an internal extension arm), FIG. 3D (in the context of a 3′ extension arm), and FIG. 3E (in the context of a 5′ extension arm). The extension arm, including the DNA synthesis template, may be comprised of DNA or RNA. In the case of RNA, the polymerase of the prime editor can be an RNA-dependent DNA polymerase (e.g., a reverse transcriptase). In the case of DNA, the polymerase of the prime editor can be a DNA-dependent DNA polymerase. In various embodiments (e.g., as depicted in FIGS. 3D-3E), the DNA synthesis template (4) may comprise the “edit template” and the “homology arm”, and all or a portion of the optional 5′ end modifier region, e2. That is, depending on the nature of the e2 region (e.g., whether it includes a hairpin, toeloop, or stem/loop secondary structure), the polymerase may encode none, some, or all of the e2 region, as well. Said another way, in the case of a 3′ extension arm, the DNA synthesis template (3) can include the portion of the extension arm (3) that spans from the 5′ end of the primer binding site (PBS) to 3′ end of the gRNA core that may operate as a template for the synthesis of a single-strand of DNA by a polymerase (e.g., a reverse transcriptase). In the case of a 5′ extension arm, the DNA synthesis template (3) can include the portion of the extension arm (3) that spans from the 5′ end of the PEgRNA molecule to the 3′ end of the edit template. Preferably, the DNA synthesis template excludes the primer binding site (PBS) of PEgRNAs either having a 3′ extension arm or a 5′ extension arm. Certain embodiments described here (e.g, FIG. 71A) refer to an “an RT template,” which is inclusive of the edit template and the homology arm, i.e., the sequence of the PEgRNA extension arm which is actually used as a template during DNA synthesis. The term “RT template” is equivalent to the term “DNA synthesis template.”

[0194] In the case of trans prime editing (e.g., FIG. 3G and FIG. 3H), the primer binding site (PBS) and the DNA synthesis template can be engineered into a separate molecule referred to as a trans prime editor RNA template (tPERT).

### Dimerization Domain

[0195] The term “dimerization domain” refers to a ligand-binding domain that binds to a binding moiety of a bi-specific ligand. A “first” dimerization domain binds to a first binding moiety of a bi-specific ligand and a “second” dimerization domain binds to a second binding moiety of the same bi-specific ligand. When the first dimerization domain is fused to a first protein (e.g., via PE, as discussed herein) and the second dimerization domain (e.g., via PE, as discussed herein) is fused to a second protein, the first and second protein dimerize in the presence of a bi-specific ligand, wherein the bi-specific ligand has at least one moiety that binds to the first dimerization domain and at least another moiety that binds to the second dimerization domain.

### Downstream

[0196] As used herein, the terms “upstream” and “downstream” are terms of relativity that define the linear position of at least two elements located in a nucleic acid molecule (whether single or double-stranded) that is orientated in a 5′-to-3′ direction. In particular, a first element is upstream of a second element in a nucleic acid molecule where the first element is positioned somewhere that is 5′ to the second element. For example, a SNP is upstream of a Cas9-induced nick site if the SNP is on the 5′ side of the nick site. Conversely, a first element is downstream of a second element in a nucleic acid molecule where the first element is positioned somewhere that is 3′ to the second element. For example, a SNP is downstream of a Cas9-induced nick site if the SNP is on the 3′ side of the nick site. The nucleic acid molecule can be a DNA (double or single stranded). RNA (double or single stranded), or a hybrid of DNA and RNA. The analysis is the same for single strand nucleic acid molecule and a double strand molecule since the terms upstream and downstream are in reference to only a single strand of a nucleic acid molecule, except that one needs to select which strand of the double stranded molecule is being considered. Often, the strand of a double stranded DNA which can be used to determine the positional relativity of at least two elements is the “sense” or “coding” strand. In genetics, a “sense” strand is the segment within double-stranded DNA that runs from 5′ to 3′, and which is complementary to the antisense strand of DNA, or template strand, which runs from 3′ to 5′. Thus, as an example, a SNP nucleobase is “downstream” of a promoter sequence in a genomic DNA (which is double-stranded) if the SNP nucleobase is on the 3′ side of the promoter on the sense or coding strand.

### Edit Template

[0197] The term “edit template” refers to a portion of the extension arm that encodes the desired edit in the single strand 3′ DNA flap that is synthesized by the polymerase, e.g., a DNA-dependent DNA polymerase, RNA-dependent DNA polymerase (e.g., a reverse transcriptase). Certain embodiments described here (e.g., FIG. 71A) refer to “an RT template,” which refers to both the edit template and the homology arm together, i.e., the sequence of the PEgRNA extension arm which is actually used as a template during DNA synthesis. The term “RT edit template” is also equivalent to the term “DNA synthesis template,” but wherein the RT edit template reflects the use of a prime editor having a polymerase that is a reverse transcriptase, and wherein the DNA synthesis template reflects more broadly the use of a prime editor having any polymerase.

### Effective Amount

[0198] The term “effective amount,” as used herein, refers to an amount of a biologically active agent that is sufficient to elicit a desired biological response. For example, in some embodiments, an effective amount of a prime editor (PE) may refer to the amount of the editor that is sufficient to edit a target site nucleotide sequence, e.g., a genome. In some embodiments, an effective amount of a prime editor (PE) provided herein, e.g., of a fusion protein comprising a nickase Cas9 domain and a reverse transcriptase may refer to the amount of the fusion protein that is sufficient to induce editing of a target site specifically bound and edited by the fusion protein. As will be appreciated by the skilled artisan, the effective amount of an agent, e.g., a fusion protein, a nuclease, a hybrid protein, a protein dimer, a complex of a protein (or protein dimer) and a polynucleotide, or a polynucleotide, may vary depending on various factors as, for example, on the desired biological response, e.g., on the specific allele, genome, or target site to be edited, on the cell or tissue being targeted, and on the agent being used.

### Error-Prone Reverse Transcriptase

[0199] As used herein, the term “error-prone” reverse transcriptase (or more broadly, any polymerase) refers to a reverse transcriptase (or more broadly, any polymerase) that occurs naturally or which has been derived from another reverse transcriptase (e.g., a wild type M-MLV reverse transcriptase) which has an error rate that is less than the error rate of wild type M-MLV reverse transcriptase. The error rate of wild type M-MLV reverse transcriptase is reported to be in the range of one error in 15,000 (higher) to 27,000 (lower). An error rate of 1 in 15,000 corresponds with an error rate of 6.7×10⁻⁵. An error rate of 1 in 27,000 corresponds with an error rate of 3.7×10⁻⁵. See Boutabout et al. (2001) “DNA synthesis fidelity by the reverse transcriptase of the yeast retrotransposon Ty 1,” Nucleic Acids Res 29(11):2217-2222, which is incorporated herein by reference. Thus, for purposes of this application, the term “error prone” refers to those RT that have an error rate that is greater than one error in 15,000 nucleobase incorporation (6.7×10⁻⁵ or higher), e.g., 1 error in 14,000 nucleobases (7.14×10⁻⁵ or higher), 1 error in 13,000 nucleobases or fewer (7.7×10⁻⁵ or higher), 1 error in 12,000 nucleobases or fewer (7.7×10⁻⁵ or higher), 1 error in 11,000 nucleobases or fewer (9.1×10⁻⁵ or higher), 1 error in 10,000 nucleobases or fewer (1×10⁻⁴ or 0.0001 or higher), 1 error in 9,000 nucleobases or fewer (0.00011 or higher), 1 error in 8,000 nucleobases or fewer (0.00013 or higher) 1 error in 7,000 nucleobases or fewer (0.00014 or higher), 1 error in 6,000 nucleobases or fewer (0.00016 or higher), 1 error in 5,000 nucleobases or fewer (0.0002 or higher), 1 error in 4,000 nucleobases or fewer (0.00025 or higher), 1 error in 3,000 nucleobases or fewer (0.00033 or higher), 1 error in 2,000 nucleobase or fewer (0.00050 or higher), or 1 error in 1,000 nucleobases or fewer (0.001 or higher), or 1 error in 500 nucleobases or fewer (0.002 or higher), or 1 error in 250 nucleobases or fewer (0.004 or higher).

### Extein

[0200] The term “extein,” as used herein, refers to an polypeptide sequence that is flanked by an intein and is ligated to another extein during the process of protein splicing to form a mature, spliced protein. Typically, an intein is flanked by two extein sequences that are ligated together when the intein catalyzes its own excision. Exteins, accordingly, are the protein analog to exons found in mRNA. For example, a polypeptide comprising an intein may be of the structure extein(N)-intein-extein(C). After excision of the intein and splicing of the two exteins, the resulting structures are extein(N)-extein(C) and a free intein. In various configurations, the exteins may be separate proteins (e.g., half of a Cas9 or PE fusion protein), each fused to a split-intein, wherein the excision of the split inteins causes the splicing together of the extein sequences.

### Extension Arm

[0201] The term “extension arm” refers to a nucleotide sequence component of a PEgRNA which provides several functions, including a primer binding site and an edit template for reverse transcriptase. In some embodiments, e.g., FIG. 3D, the extension arm is located at the 3′ end of the guide RNA. In other embodiments, e.g., FIG. 3E, the extension arm is located at the 5′ end of the guide RNA. In some embodiments, the extension arm also includes a homology arm. In various embodiments, the extension arm comprises the following components in a 5′ to 3′ direction: the homology arm, the edit template, and the primer binding site. Since polymerization activity of the reverse transcriptase is in the 5′ to 3′ direction, the preferred arrangement of the homology arm, edit template, and primer binding site is in the 5′ to 3′ direction such that the reverse transcriptase, once primed by an annealed primer sequence, polymerases a single strand of DNA using the edit template as a complementary template strand. Further details, such as the length of the extension arm, are described elsewhere herein.

[0202] The extension arm may also be described as comprising generally two regions: a primer binding site (PBS) and a DNA synthesis template, as shown in FIG. 3G (top), for instance. The primer binding site binds to the primer sequence that is formed from the endogenous DNA strand of the target site when it becomes nicked by the prime editor complex, thereby exposing a 3′ end on the endogenous nicked strand. As explained herein, the binding of the primer sequence to the primer binding site on the extension arm of the PEgRNA creates a duplex region with an exposed 3′ end (i.e., the 3′ of the primer sequence), which then provides a substrate for a polymerase to begin polymerizing a single strand of DNA from the exposed 3′ end along the length of the DNA synthesis template. The sequence of the single strand DNA product is the complement of the DNA synthesis template. Polymerization continues towards the 5′ of the DNA synthesis template (or extension arm) until polymerization terminates. Thus, the DNA synthesis template represents the portion of the extension arm that is encoded into a single strand DNA product (i.e., the 3′ single strand DNA flap containing the desired genetic edit information) by the polymerase of the prime editor complex and which ultimately replaces the corresponding endogenous DNA strand of the target site that sits immediate downstream of the PE-induced nick site. Without being bound by theory, polymerization of the DNA synthesis template continues towards the 5′ end of the extension arm until a termination event. Polymerization may terminate in a variety of ways, including, but not limited to (a) reaching a 5′ terminus of the PEgRNA (e.g., in the case of the 5′ extension arm wherein the DNA polymerase simply runs out of template), (b) reaching an impassable RNA secondary structure (e.g., hairpin or stem/loop), or (c) reaching a replication termination signal, e.g., a specific nucleotide sequence that blocks or inhibits the polymerase, or a nucleic acid topological signal, such as, supercoiled DNA or RNA.

### Flap Endonuclease (e.g., FEN1)

[0203] As used herein, the term “flap endonuclease” refers to an enzyme that catalyzes the removal of 5′ single strand DNA flaps. These are naturally occurring enzymes that process the removal of 5′ flaps formed during cellular processes, including DNA replication. The prime editing methods herein described may utilize endogenously supplied flap endonucleases or those provided in trans to remove the 5′ flap of endogenous DNA formed at the target site during prime editing. Flap endonucleases are known in the art and can be found described in Patel et al., “Flap endonucleases pass 5′-flaps through a flexible arch using a disorder-thread-order mechanism to confer specificity for free 5′-ends,” Nucleic Acids Research, 2012, 40(10): 4507-4519, Tsutakawa et al., “Human flap endonuclease structures, DNA double-base flipping, and a unified understanding of the FEN1 superfamily,” Cell, 2011, 145(2): 198-211, and Balakrishnan et al., “Flap Endonuclease 1,” Annu Rev Biochem, 2013, Vol 82: 119-138 (each of which are incorporated herein by reference). An exemplary flap endonuclease is FEN1, which can be represented by the following amino acid sequence:

| DESCRIP- | | SEQ ID |
|---|---|---|
| TION | SEQUENCE | NO: |
| FEN1 | MGIQGLAKLIADVAPSAIRENDIKSYFGRKVAI | SEQ ID |
| WILD | DASMSIYQFLIAVRQGGDVLQNEEGETTSHLMG | NO: 7 |
| TYPE | MFYRTIRMMENGIKPVYVFDGKPPQLKSGELAK | |
| | RSERRAEAEKQLQQAQAAGAEQEVEKFTKRLVK | |
| | VTKQHNDECKHLLSLMGIPYLDAPSEAEASCAA | |
| | LVKAGKVYAAATEDMDCLTFGSPVLMRHLTASE | |
| | AKKLPIQEFHLSRILQELGLNQEQFVDLCILLG | |
| | SDYCESIRGIGPKRAVDLIQKHKSIEEIVRRLD | |
| | PNKYPVPENWLHKEAHQLFLEPEVLDPESVELK | |
| | WSEPNEEELIKFMCGEKQFSEERIRSGVKRLSK | |
| | SRQGSTQGRLDDFFKVTGSLSSAKRKEPEPKGS | |
| | TKKKAKTGAAGKFKRGK | |

### Functional Equivalent

[0204] The term “functional equivalent” refers to a second biomolecule that is equivalent in function, but not necessarily equivalent in structure to a first biomolecule. For example, a “Cas9 equivalent” refers to a protein that has the same or substantially the same functions as Cas9, but not necessarily the same amino acid sequence. In the context of the disclosure, the specification refers throughout to “a protein X, or a functional equivalent thereof.” In this context, a “functional equivalent” of protein X embraces any homolog, paralog, fragment, naturally occurring, engineered, mutated, or synthetic version of protein X which bears an equivalent function.

### Fusion Protein

[0205] The term “fusion protein” as used herein refers to a hybrid polypeptide which comprises protein domains from at least two different proteins. One protein may be located at the amino-terminal (N-terminal) portion of the fusion protein or at the carboxy-terminal (C-terminal) protein thus forming an “amino-terminal fusion protein” or a “carboxy-terminal fusion protein,” respectively. A protein may comprise different domains, for example, a nucleic acid binding domain (e.g., the gRNA binding domain of Cas9 that directs the binding of the protein to a target site) and a nucleic acid cleavage domain or a catalytic domain of a nucleic-acid editing protein. Another example includes a Cas9 or equivalent thereof to a reverse transcriptase. Any of the proteins provided herein may be produced by any method known in the art. For example, the proteins provided herein may be produced via recombinant protein expression and purification, which is especially suited for fusion proteins comprising a peptide linker. Methods for recombinant protein expression and purification are well known, and include those described by Green and Sambrook, Molecular Cloning: A Laboratory Manual (4^{th} ed., Cold Spring Harbor Laboratory Press, Cold Spring Harbor, N.Y. (2012)), the entire contents of which are incorporated herein by reference.

### Gene of Interest (GOI)

[0206] The term “gene of interest” or “GOI” refers to a gene that encodes a biomolecule of interest (e.g., a protein or an RNA molecule). A protein of interest can include any intracellular protein, membrane protein, or extracellular protein, e.g., a nuclear protein, transcription factor, nuclear membrane transporter, intracellular organelle associated protein, a membrane receptor, a catalytic protein, and enzyme, a therapeutic protein, a membrane protein, a membrane transport protein, a signal transduction protein, or an immunological protein (e.g., an IgG or other antibody protein), etc. The gene of interest may also encode an RNA molecule, including, but not limited to, messenger RNA (mRNA), transfer RNA (tRNA), ribosomal RNA (rRNA), small nuclear RNA (snRNA), antisense RNA, guide RNA, microRNA (miRNA), small interfering RNA (siRNA), and cell-free RNA (cfRNA).

Guide RNA (“gRNA”)

[0207] As used herein, the term “guide RNA” is a particular type of guide nucleic acid which is mostly commonly associated with a Cas protein of a CRISPR-Cas9 and which associates with Cas9, directing the Cas9 protein to a specific sequence in a DNA molecule that includes complementarity to protospacer sequence of the guide RNA. However, this term also embraces the equivalent guide nucleic acid molecules that associate with Cas9 equivalents, homologs, orthologs, or paralogs, whether naturally occurring or non-naturally occurring (e.g., engineered or recombinant), and which otherwise program the Cas9 equivalent to localize to a specific target nucleotide sequence. The Cas9 equivalents may include other napDNAbp from any type of CRISPR system (e.g., type II, V, VI), including Cpf1 (a type-V CRISPR-Cas systems), C2c1 (a type V CRISPR-Cas system), C2c2 (a type VI CRISPR-Cas system) and C2c3 (a type V CRISPR-Cas system). Further Cas-equivalents are described in Makarova et al., “C2c2 is a single-component programmable RNA-guided RNA-targeting CRISPR effector,” Science 2016; 353(6299), the contents of which are incorporated herein by reference. Exemplary sequences are and structures of guide RNAs are provided herein. In addition, methods for designing appropriate guide RNA sequences are provided herein. As used herein, the “guide RNA” may also be referred to as a “traditional guide RNA” to contrast it with the modified forms of guide RNA termed “prime editing guide RNAs” (or “PEgRNAs”) which have been invented for the prime editing methods and composition disclosed herein.

[0208] Guide RNAs or PEgRNAs may comprise various structural elements that include, but are not limited to:

[0209] Spacer sequence—the sequence in the guide RNA or PEgRNA (having about 20 nts in length) which binds to the protospacer in the target DNA.

[0210] gRNA core (or gRNA scaffold or backbone sequence)—refers to the sequence within the gRNA that is responsible for Cas9 binding, it does not include the 20 bp spacer/targeting sequence that is used to guide Cas9 to target DNA.

[0211] Extension arm—a single strand extension at the 3′ end or the 5′ end of the PEgRNA which comprises a primer binding site and a DNA synthesis template sequence that encodes via a polymerase (e.g., a reverse transcriptase) a single stranded DNA flap containing the genetic change of interest, which then integrates into the endogenous DNA by replacing the corresponding endogenous strand, thereby installing the desired genetic change.

[0212] Transcription terminator—the guide RNA or PEgRNA may comprise a transcriptional termination sequence at the 3′ of the molecule.

### Homology Arm

[0213] The term “homology arm” refers to a portion of the extension arm that encodes a portion of the resulting reverse transcriptase-encoded single strand DNA flap that is to be integrated into the target DNA site by replacing the endogenous strand. The portion of the single strand DNA flap encoded by the homology arm is complementary to the non-edited strand of the target DNA sequence, which facilitates the displacement of the endogenous strand and annealing of the single strand DNA flap in its place, thereby installing the edit. This component is further defined elsewhere. The homology arm is part of the DNA synthesis template since it is by definition encoded by the polymerase of the prime editors described herein.

### Host Cell

[0214] The term “host cell,” as used herein, refers to a cell that can host, replicate, and express a vector described herein, e.g., a vector comprising a nucleic acid molecule encoding a fusion protein comprising a Cas9 or Cas9 equivalent and a reverse transcriptase.

### Inteins

[0215] As used herein, the term “intein” refers to auto-processing polypeptide domains found in organisms from all domains of life. An intein (intervening protein) carries out a unique auto-processing event known as protein splicing in which it excises itself out from a larger precursor polypeptide through the cleavage of two peptide bonds and, in the process, ligates the flanking extein (external protein) sequences through the formation of a new peptide bond. This rearrangement occurs post-translationally (or possibly co-translationally), as intein genes are found embedded in frame within other protein-coding genes. Furthermore, intein-mediated protein splicing is spontaneous; it requires no external factor or energy source, only the folding of the intein domain. This process is also known as cis-protein splicing, as opposed to the natural process of trans-protein splicing with “split inteins.” Inteins are the protein equivalent of the self-splicing RNA introns (see Perler et al., Nucleic Acids Res. 22:1125-1127 (1994)), which catalyze their own excision from a precursor protein with the concomitant fusion of the flanking protein sequences, known as exteins (reviewed in Perler et al., Curr. Opin. Chem. Biol. 1:292-299 (1997); Perler, F. B. Cell 92(1):1-4 (1998); Xu et al., EMBO J. 15(19):5146-5153 (1996)).

[0216] As used herein, the term “protein splicing” refers to a process in which an interior region of a precursor protein (an intein) is excised and the flanking regions of the protein (exteins) are ligated to form the mature protein. This natural process has been observed in numerous proteins from both prokaryotes and eukaryotes (Perler, F. B., Xu, M. Q., Paulus, H. Current Opinion in Chemical Biology 1997, 1, 292-299; Perler, F. B. Nucleic Acids Research 1999, 27, 346-347). The intein unit contains the necessary components needed to catalyze protein splicing and often contains an endonuclease domain that participates in intein mobility (Perler, F. B., Davis, E. O., Dean, G. E., Gimble, F. S., Jack, W. E., Neff, N., Noren, C. J., Thomer, J., Belfort, M. Nucleic Acids Research 1994, 22, 1127-1127). The resulting proteins are linked, however, not expressed as separate proteins. Protein splicing may also be conducted in trans with split inteins expressed on separate polypeptides spontaneously combine to form a single intein which then undergoes the protein splicing process to join to separate proteins.

[0217] The elucidation of the mechanism of protein splicing has led to a number of intein-based applications (Comb, et al., U.S. Pat. No. 5,496,714; Comb, et al., U.S. Pat. No. 5,834,247; Camarero and Muir, J. Amer. Chem. Soc., 121:5597-5598 (1999); Chong, et al., Gene, 192:271-281 (1997), Chong, et al., Nucleic Acids Res., 26:5109-5115 (1998); Chong, et al., J. Biol. Chem., 273:10567-10577 (1998); Cotton, et al. J. Am. Chem. Soc., 121:1100-1101 (1999); Evans, et al., J. Biol. Chem., 274:18359-18363 (1999); Evans, et al., J. Biol. Chem., 274:3923-3926 (1999); Evans, et al., Protein Sci., 7:2256-2264 (1998); Evans, et al., J. Biol. Chem., 275:9091-9094 (2000); Iwai and Pluckthun, FEBS Lett. 459:166-172 (1999); Mathys, et al., Gene, 231:1-13 (1999); Mills, et al., Proc. Natl. Acad. Sci. USA 95:3543-3548 (1998); Muir, et al., Proc. Natl. Acad. Sci. USA 95:6705-6710 (1998); Otomo, et al., Biochemistry 38:16040-16044 (1999); Otomo, et al., J. Biolmol. NMR 14:105-114 (1999); Scott, et al., Proc. Natl. Acad. Sci. USA 96:13638-13643 (1999); Severinov and Muir, J. Biol. Chem., 273:16205-16209 (1998); Shingledecker, et al., Gene, 207:187-195 (1998); Southworth, et al., EMBO J. 17:918-926 (1998); Southworth, et al., Biotechniques, 27:110-120 (1999); Wood, et al., Nat. Biotechnol., 17:889-892 (1999); Wu, et al., Proc. Natl. Acad. Sci. USA 95:9226-9231 (1998a); Wu, et al., Biochim Biophys Acta 1387:422-432 (1998b); Xu, et al., Proc. Natl. Acad. Sci. USA 96:388-393 (1999); Yamazaki, et al., J. Am. Chem. Soc., 120:5591-5592 (1998)). Each reference is incorporated herein by reference.

### Ligand-Dependent Intein

[0218] The term “ligand-dependent intein,” as used herein refers to an intein that comprises a ligand-binding domain. Typically, the ligand-binding domain is inserted into the amino acid sequence of the intein, resulting in a structure intein (N)-ligand-binding domain-intein (C). Typically, ligand-dependent inteins exhibit no or only minimal protein splicing activity in the absence of an appropriate ligand, and a marked increase of protein splicing activity in the presence of the ligand. In some embodiments, the ligand-dependent intein does not exhibit observable splicing activity in the absence of ligand but does exhibit splicing activity in the presence of the ligand. In some embodiments, the ligand-dependent intein exhibits an observable protein splicing activity in the absence of the ligand, and a protein splicing activity in the presence of an appropriate ligand that is at least 5 times, at least 10 times, at least 50 times, at least 100 times, at least 150 times, at least 200 times, at least 250 times, at least 500 times, at least 1000 times, at least 1500 times, at least 2000 times, at least 2500 times, at least 5000 times, at least 10000 times, at least 20000 times, at least 25000 times, at least 50000 times, at least 100000 times, at least 500000 times, or at least 1000000 times greater than the activity observed in the absence of the ligand. In some embodiments, the increase in activity is dose dependent over at least 1 order of magnitude, at least 2 orders of magnitude, at least 3 orders of magnitude, at least 4 orders of magnitude, or at least 5 orders of magnitude, allowing for fine-tuning of intein activity by adjusting the concentration of the ligand. Suitable ligand-dependent inteins are known in the art, and in include those provided below and those described in published U.S. Patent Application U.S. 2014/0065711 A1; Mootz et al., “Protein splicing triggered by a small molecule.” J. Am. Chem. Soc. 2002; 124, 9044-9045; Mootz et al., “Conditional protein splicing: a new tool to control protein structure and function in vitro and in vivo.” J. Am. Chem. Soc. 2003; 125, 10561-10569; Buskirk et al., Proc. Natl. Acad. Sci. USA. 2004; 101, 10505-10510); Skretas & Wood, “Regulation of protein activity with small-molecule-controlled inteins.” Protein Sci. 2005; 14, 523-532; Schwartz, et al., “Post-translational enzyme activation in an animal via optimized conditional protein splicing.” Nat. Chem. Biol. 2007; 3, 50-54; Peck et al., Chem. Biol. 2011; 18 (5), 619-630; the entire contents of each are hereby incorporated by reference. Exemplary sequences are as follows:

| NAME | SEQUENCE OF LIGAND-DEPENDENT INTEIN |
|---|---|
| 2-4 | CLAEGTRIFDPVTGTTHRIEDVVDGRKPIHVVAAAKDGTLL |
| INTEIN: | ARPVVSWFDQGTRDVIGLRIAGGAIVWATPDHKVLTEYGWR |
| | AAGELRKGDRVAGPGGSGNSLALSLTADQMVSALLDAEPPI |
| | LYSEYDPTSPFSEASMMGLLTNLADRELVHMINWAKRVPGF |
| | VDLTLHDQAHLLECAWLEILMIGLVWRSMEHPGKLLFAPNL |
| | LLDRNQGKCVEGMVEIFDMLLATSSRFRMMNLQGEEFVCLK |
| | SIILLNSGVYTFLSSTLKSLEEKDHIHRALDKITDTLIHLM |
| | AKAGLTLQQQHQRLAQLLLILSHIRHMSNKGMEHLYSMKYK |
| | NVVPLYDLLLEMLDAHRLHAGGSGASRVQAFADALDDKFLH |
| | DMLAEELRYSVIREVLPTRRARTFDLEVEELHTLVAEGVVV |
| | HNC (SEQ ID NO: 8) |
| 3-2 | CLAEGTRIFDPVTGTTHRIEDVVDGRKPIHVVAVAKDGTLL |
| INTEIN | ARPVVSWFDQGTRDVIGLRIAGGAIVWATPDHKVLTEYGWR |
| | AAGELRKGDRVAGPGGSGNSLALSLTADQMVSALLDAEPPI |
| | LYSEYDPTSPFSEASMMGLLTNLADRELVHMINWAKRVPGF |
| | VDLTLHDQAHLLECAWLEILMIGLVWRSMEHPGKLLFAPNL |
| | LLDRNQGKCVEGMVEIFDMLLATSSRFRMMNLQGEEFVCLK |
| | SIILLNSGVYTFLSSTLKSLEEKDHIHRALDKITDTLIHLM |
| | AKAGLTLQQQHQRLAQLLLILSHIRHMSNKGMEHLYSMKYT |
| | NVVPLYDLLLEMLDAHRLHAGGSGASRVQAFADALDDKFLH |
| | DMLAEELRYSVIREVLPTRRARTFDLEVEELHTLVAEGVVV |
| | HNC (SEQ ID NO: 9) |
| 30R3-1 | CLAEGTRIFDPVTGTTHRIEDVVDGRKPIHVVAAAKDGTLL |
| INTEIN | ARPVVSWFDQGTRDVIGLRIAGGATVWATPDHKVLTEYGWR |
| | AAGELRKGDRVAGPGGSGNSLALSLTADQMVSALLDAEPPI |
| | PYSEYDPTSPFSEASMMGLLTNLADRELVHMINWAKRVPGF |
| | VDLTLHDQAHLLECAWLEILMIGLVWRSMEHPGKLLFAPNL |
| | LLDRNQGKCVEGMVEIFDMLLATSSRFRMMNLQGEEFVCLK |
| | SIILLNSGVYTFLSSTLKSLEEKDHIHRALDKITDTLIHLM |
| | AKAGLTLQQQHQRLAQLLLILSHIRHMSNKGMEHLYSMKYK |
| | NVVPLYDLLLEMLDAHRLHAGGSGASRVQAFADALDDKFLH |
| | DMLAEGLRYSVIREVLPTRRARTFDLEVEELHTLVAEGVVV |
| | HNC (SEQ ID NO: 10) |
| 30R3-2 | CLAEGTRIFDPVTGTTHRIEDVVDGRKPIHVVAAAKDGTLL |
| INTEIN | ARPVVSWFDQGTRDVIGLRIAGGATVWATPDHKVLTEYGWR |
| | AAGELRKGDRVAGPGGSGNSLALSLTADQMVSALLDAEPPI |
| | LYSEYDPTSPFSEASMMGLLTNLADRELVHMINWAKRVPGF |
| | VDLTLHDQAHLLECAWLEILMIGLVWRSMEHPGKLLFAPNL |
| | LLDRNQGKCVEGMVEIFDMLLATSSRFRMMNLQGEEFVCLK |
| | SIILLNSGVYTFLSSTLKSLEEKDHIHRALDKITDTLIHLM |
| | AKAGLTLQQQHQRLAQLLLILSHIRHMSNKGMEHLYSMKYK |
| | NVVPLYDLLLEMLDAHRLHAGGSGASRVQAFADALDDKFLH |
| | DMLAEELRYSVIREVLPTRRARTFDLEVEELHTLVAEGVVV |
| | HNC (SEQ ID NO: 11) |
| 30R3-3 | CLAEGTRIFDPVTGTTHRIEDVVDGRKPIHVVAAAKDGTLL |
| INTEIN | ARPVVSWFDQGTRDVIGLRIAGGATVWATPDHKVLTEYGWR |
| | AAGELRKGDRVAGPGGSGNSLALSLTADQMVSALLDAEPPI |
| | PYSEYDPTSPFSEASMMGLLTNLADRELVHMINWAKRVPGF |
| | VDLTLHDQAHLLECAWLEILMIGLVWRSMEHPGKLLFAPNL |
| | LLDRNQGKCVEGMVEIFDMLLATSSRFRMMNLQGEEFVCLK |
| | SIILLNSGVYTFLSSTLKSLEEKDHIHRALDKITDTLIHLM |
| | AKAGLTLQQQHQRLAQLLLILSHIRHMSNKGMEHLYSMKYK |
| | NVVPLYDLLLEMLDAHRLHAGGSGASRVQAFADALDDKFLH |
| | DMLAEELRYSVIREVLPTRRARTFDLEVEELHTLVAEGVVV |
| | HNC (SEQ ID NO: 12) |
| 37R3-1 | CLAEGTRIFDPVTGTTHRIEDVVDGRKPIHVVAAAKDGTLL |
| INTEIN | ARPVVSWFDQGTRDVIGLRIAGGATVWATPDHKVLTEYGWR |
| | AAGELRKGDRVAGPGGSGNSLALSLTADQMVSALLDAEPPI |
| | LYSEYNPTSPFSEASMMGLLTNLADRELVHMINWAKRVPGF |
| | VDLTLHDQAHLLERAWLEILMIGLVWRSMEHPGKLLFAPNL |
| | LLDRNQGKCVEGMVEIFDMLLATSSRFRMMNLQGEEFVCLK |
| | SIILLNSGVYTFLSSTLKSLEEKDHIHRALDKITDTLIHLM |
| | AKAGLTLQQQHQRLAQLLLILSHIRHMSNKGMEHLYSMKYK |
| | NVVPLYDLLLEMLDAHRLHAGGSGASRVQAFADALDDKFLH |
| | DMLAEGLRYSVIREVLPTRRARTFDLEVEELHTLVAEGVVV |
| | HNC ((SEQ ID NO: 13) |
| 37R3-2 | CLAEGTRIFDPVTGTTHRIEDVVDGRKPIHVVAAAKDGTLL |
| INTEIN | ARPVVSWFDQGTRDVIGLRIAGGAIVWATPDHKVLTEYGWR |
| | AAGELRKGDRVAGPGGSGNSLALSLTADQMVSALLDAEPPI |
| | LYSEYDPTSPFSEASMMGLLTNLADRELVHMINWAKRVPGF |
| | VDLTLHDQAHLLERAWLEILMIGLVWRSMEHPGKLLFAPNL |
| | LLDRNQGKCVEGMVEIFDMLLATSSRFRMMNLQGEEFVCLK |
| | SIILLNSGVYTFLSSTLKSLEEKDHIHRALDKITDTLIHLM |
| | AKAGLTLQQQHQRLAQLLLILSHIRHMSNKGMEHLYSMKYK |
| | NVVPLYDLLLEMLDAHRLHAGGSGASRVQAFADALDDKFLH |
| | DMLAEGLRYSVIREVLPTRRARTFDLEVEELHTLVAEGVVV |
| | HNC (SEQ ID NO: 14) |
| 37R3-3 | CLAEGTRIFDPVTGTTHRIEDVVDGRKPIHVVAVAKDGTLL |
| INTEIN | ARPVVSWFDQGTRDVIGLRIAGGATVWATPDHKVLTEYGWR |
| | AAGELRKGDRVAGPGGSGNSLALSLTADQMVSALLDAEPPI |
| | LYSEYDPTSPFSEASMMGLLTNLADRELVHMINWAKRVPGF |
| | VDLTLHDQAHLLERAWLEILMIGLVWRSMEHPGKLLFAPNL |
| | LLDRNQGKCVEGMVEIFDMLLATSSRFRMMNLQGEEFVCLK |
| | SIILLNSGVYTFLSSTLKSLEEKDHIHRALDKITDTLIHLM |
| | AKAGLTLQQQHQRLAQLLLILSHIRHMSNKGMEHLYSMKYK |
| | NVVPLYDLLLEMLDAHRLHAGGSGASRVQAFADALDDKFLH |
| | DMLAEELRYSVIREVLPTRRARTFDLEVEELHTLVAEGVVV |
| | HNC (SEQ ID NO: 15) |

### Linker

[0219] The term “linker,” as used herein, refers to a molecule linking two other molecules or moieties. The linker can be an amino acid sequence in the case of a linker joining two fusion proteins. For example, a Cas9 can be fused to a reverse transcriptase by an amino acid linker sequence. The linker can also be a nucleotide sequence in the case of joining two nucleotide sequences together. For example, in the instant case, the traditional guide RNA is linked via a spacer or linker nucleotide sequence to the RNA extension of a prime editing guide RNA which may comprise a RT template sequence and an RT primer binding site. In other embodiments, the linker is an organic molecule, group, polymer, or chemical moiety. In some embodiments, the linker is 5-100 amino acids in length, for example, 5, 6, 7, 8, 9, 10, 11, 12, 13, 14, 15, 16, 17, 18, 19, 20, 21, 22, 23, 24, 25, 26, 27, 28, 29, 30, 30-35, 35-40, 40-45, 45-50, 50-60, 60-70, 70-80, 80-90, 90-100, 100-150, or 150-200 amino acids in length. Longer or shorter linkers are also contemplated.

### Isolated

[0220] “Isolated” means altered or removed from the natural state. For example, a nucleic 20 acid or a peptide naturally present in a living animal is not “isolated,” but the same nucleic acid or peptide partially or completely separated from the coexisting materials of its natural state is “isolated.” An isolated nucleic acid or protein can exist in substantially purified form, or can exist in a non-native environment such as, for example, a host cell.

[0221] In some embodiments, a gene of interest is encoded by an isolated nucleic acid. As used herein, the term “isolated,” refers to the characteristic of a material as provided herein being removed from its original or native environment (e.g., the natural environment if it is naturally occurring). Therefore, a naturally-occurring polynucleotide or protein or polypeptide present in a living animal is not isolated, but the same polynucleotide or polypeptide, separated by human intervention from some or all of the coexisting materials in the natural system, is isolated. An artificial or engineered material, for example, a non-naturally occurring nucleic acid construct, such as the expression constructs and vectors described herein, are, accordingly, also referred to as isolated. A material does not have to be purified in order to be isolated. Accordingly, a material may be part of a vector and/or part of a composition, and still be isolated in that such vector or composition is not part of the environment in which the material is found in nature.

### MS2 Tagging Technique

[0222] In various embodiments (e.g., as depicted in the embodiments of FIGS. 72-73 and in Example 19), the term “MS2 tagging technique” refers to the combination of an “RNA-protein interaction domain” (aka “RNA-protein recruitment domain or protein”) paired up with an RNA-binding protein that specifically recognizes and binds to the RNA-protein interaction domain, e.g., a specific hairpin structure. These types of systems can be leveraged to recruit a variety of functionalities to a prime editor complex that is bound to a target site. The MS2 tagging technique is based on the natural interaction of the MS2 bacteriophage coat protein (“MCP” or “MS2cp”) with a stem-loop or hairpin structure present in the genome of the phage, i.e., the “MS2 hairpin.” In the case of prime editing, the MS2 tagging technique comprises introducing the MS2 hairpin into a desired RNA molecule involved in prime editing (e.g., a PEgRNA or a tPERT), which then constitutes a specific interactable binding target for an RNA-binding protein that recognizes and binds to that structure. In the case of the MS2 hairpin, it is recognized and bound by the MS2 bacteriophage coat protein (MCP). And, if MCP is fused to another protein (e.g., a reverse transcriptase or other DNA polymerase), then the MS2 hairpin may be used to “recruit” that other protein in trans to the target site occupied by the prime editing complex.

[0223] The prime editors described herein may incorporate as an aspect any known RNA-protein interaction domain to recruit or “co-localize” specific functions of interest to a prime editor complex. A review of other modular RNA-protein interaction domains are described in the art, for example, in Johansson et al., “RNA recognition by the MS2 phage coat protein,” Sem Virol., 1997, Vol. 8(3): 176-185; Delebecque et al., “Organization of intracellular reactions with rationally designed RNA assemblies,” Science, 2011, Vol. 333: 470-474; Mali et al., “Cas9 transcriptional activators for target specificity screening and paired nickases for cooperative genome engineering,” Nat. Biotechnol., 2013, Vol. 31: 833-838; and Zalatan et al., “Engineering complex synthetic transcriptional programs with CRISPR RNA scaffolds,” Cell, 2015, Vol. 160: 339-350, each of which are incorporated herein by reference in their entireties. Other systems include the PP7 hairpin, which specifically recruits the PCP protein, and the “com” hairpin, which specifically recruits the Com protein. See Zalatan et al.

[0224] The nucleotide sequence of the MS2 hairpin (or equivalently referred to as the “MS2 aptamer”) is: GCCAACATGAGGATCACCCATGTCTGCAGGGCC (SEQ ID NO: 763).

[0225] The amino acid sequence of the MCP or MS2cp is:

(SEQ ID NO: 764)
GSASNFTQFVLVDNGGTGDVTVAPSNFANGVAEWISSNSRSQAYKVTCS
VRQSSAQNRKYTIKVEVPKVATQTVGGEELPVAGWRSYLNMELTIPIFA
TNSDCELIVKAMQGLLKDGNPIPSAIAANSGIY.

[0226] The MS2 hairpin (or “MS2 aptamer”) may also be referred to as a type of “RNA effector recruitment domain” (or equivalently as “RNA-binding protein recruitment domain” or simply as “recruitment domain”) since it is a physical structure (e.g., a hairpin) that is installed into a PEgRNA or tPERT that effectively recruits other effector functions (e.g., RNA-binding proteins having various functions, such as DNA polymerases or other DNA-modifying enzymes) to the PEgRNA or rPERT that is so modified, and thus, co-localizing effector functions in trans to the prime editing machinery. This application is not intended to be limited in any way to any particular RNA effector recruitment domains and may include any available such domain, including the MS2 hairpin. Example 19 and FIG. 72(b) depicts the use of the MS2 aptamer joined to a DNA synthesis domain (i.e., the tPERT molecule) and a prime editor that comprises an MS2cp protein fused to a PE2 to cause the co-localization of the prime editor complex (MS2cp-PE2:sgRNA complex) bound to the target DNA site and the DNA synthesis domain of the tPERT molecule to effectuate the

napDNAbn

[0227] As used herein, the term “nucleic acid programmable DNA binding protein” or “napDNAbp,” of which Cas9 is an example, refer to a proteins which use RNA:DNA hybridization to target and bind to specific sequences in a DNA molecule. Each napDNAbp is associated with at least one guide nucleic acid (e.g., guide RNA), which localizes the napDNAbp to a DNA sequence that comprises a DNA strand (i.e., a target strand) that is complementary to the guide nucleic acid, or a portion thereof (e.g., the protospacer of a guide RNA). In other words, the guide nucleic-acid “programs” the napDNAbp (e.g., Cas9 or equivalent) to localize and bind to a complementary sequence.

[0228] Without being bound by theory, the binding mechanism of a napDNAbp—guide RNA complex, in general, includes the step of forming an R-loop whereby the napDNAbp induces the unwinding of a double-strand DNA target, thereby separating the strands in the region bound by the napDNAbp. The guide RNA protospacer then hybridizes to the “target strand.” This displaces a “non-target strand” that is complementary to the target strand, which forms the single strand region of the R-loop. In some embodiments, the napDNAbp includes one or more nuclease activities, which then cut the DNA leaving various types of lesions. For example, the napDNAbp may comprises a nuclease activity that cuts the non-target strand at a first location, and/or cuts the target strand at a second location. Depending on the nuclease activity, the target DNA can be cut to form a “double-stranded break” whereby both strands are cut. In other embodiments, the target DNA can be cut at only a single site, i.e., the DNA is “nicked” on one strand. Exemplary napDNAbp with different nuclease activities include “Cas9 nickase” (“nCas9”) and a deactivated Cas9 having no nuclease activities (“dead Cas9” or “dCas9”). Exemplary sequences for these and other napDNAbp are provided herein.

### Nickase

[0229] The term “nickase” refers to a Cas9 with one of the two nuclease domains inactivated. This enzyme is capable of cleaving only one strand of a target DNA.

### Nuclear Localization Sequence (NLS)

[0230] The term “nuclear localization sequence” or “NLS” refers to an amino acid sequence that promotes import of a protein into the cell nucleus, for example, by nuclear transport. Nuclear localization sequences are known in the art and would be apparent to the skilled artisan. For example, NLS sequences are described in Plank et al., international PCT application, PCT/EP2000/011690, filed Nov. 23, 2000, published as WO/2001/038547 on May 31, 2001, the contents of which are incorporated herein by reference for its disclosure of exemplary nuclear localization sequences. In some embodiments, a NLS comprises the amino acid sequence PKKKRKV (SEQ ID NO: 16) or MDSLLMNRRKFLYQFKNVRWAKGRRETYLC (SEQ ID NO: 17).

### Nucleic Acid Molecule

[0231] The term “nucleic acid,” as used herein, refers to a polymer of nucleotides. The polymer may include natural nucleosides (i.e., adenosine, thymidine, guanosine, cytidine, uridine, deoxyadenosine, deoxythymidine, deoxyguanosine, and deoxycytidine), nucleoside analogs (e.g., 2-aminoadenosine, 2-thiothymidine, inosine, pyrrolo-pyrimidine, 3-methyl adenosine, 5-methylcytidine, C5 bromouridine, C5 fluorouridine, C5 iodouridine, C5 propynyl uridine, C5 propynyl cytidine, C5 methylcytidine, 7 deazaadenosine, 7 deazaguanosine, 8 oxoadenosine, 8 oxoguanosine, 0(6) methylguanine, 4-acetylcytidine, 5-(carboxyhydroxymethyl)uridine, dihydrouridine, methylpseudouridine, 1-methyl adenosine, 1-methyl guanosine, N6-methyl adenosine, and 2-thiocytidine), chemically modified bases, biologically modified bases (e.g., methylated bases), intercalated bases, modified sugars (e.g., 2′-fluororibose, ribose, 2′-deoxyribose, 2′-O-methylcytidine, arabinose, and hexose), or modified phosphate groups (e.g., phosphorothioates and 5′ N phosphoramidite linkages).

### PEgRNA

[0232] As used herein, the terms “prime editing guide RNA” or “PEgRNA” or “extended guide RNA” refers to a specialized form of a guide RNA that has been modified to include one or more additional sequences for implementing the prime editing methods and compositions described herein. As described herein, the prime editing guide RNA comprise one or more “extended regions” of nucleic acid sequence. The extended regions may comprise, but are not limited to, single-stranded RNA or DNA. Further, the extended regions may occur at the 3′ end of a traditional guide RNA. In other arrangements, the extended regions may occur at the 5′ end of a traditional guide RNA. In still other arrangements, the extended region may occur at an intramolecular region of the traditional guide RNA, for example, in the gRNA core region which associates and/or binds to the napDNAbp. The extended region comprises a “DNA synthesis template” which encodes (by the polymerase of the prime editor) a single-stranded DNA which, in turn, has been designed to be (a) homologous with the endogenous target DNA to be edited, and (b) which comprises at least one desired nucleotide change (e.g., a transition, a transversion, a deletion, or an insertion) to be introduced or integrated into the endogenous target DNA. The extended region may also comprise other functional sequence elements, such as, but not limited to, a “primer binding site” and a “spacer or linker” sequence, or other structural elements, such as, but not limited to aptamers, stem loops, hairpins, toe loops (e.g., a 3′ toeloop), or an RNA-protein recruitment domain (e.g., MS2 hairpin). As used herein the “primer binding site” comprises a sequence that hybridizes to a single-strand DNA sequence having a 3′ end generated from the nicked DNA of the R-loop.

[0233] In certain embodiments, the PEgRNAs are represented by FIG. 3A, which shows a PEgRNA having a 5′ extension arm, a spacer, and a gRNA core. The 5′ extension further comprises in the 5′ to 3′ direction a reverse transcriptase template, a primer binding site, and a linker. As shown, the reverse transcriptase template may also be referred to more broadly as the “DNA synthesis template” where the polymerase of a prime editor described herein is not an RT, but another type of polymerase.

[0234] In certain other embodiments, the PEgRNAs are represented by FIG. 3B, which shows a PEgRNA having a 5′ extension arm, a spacer, and a gRNA core. The 5′ extension further comprises in the 5′ to 3′ direction a reverse transcriptase template, a primer binding site, and a linker. As shown, the reverse transcriptase template may also be referred to more broadly as the “DNA synthesis template” where the polymerase of a prime editor described herein is not an RT, but another type of polymerase.

[0235] In still other embodiments, the PEgRNAs are represented by FIG. 3D, which shows a PEgRNA having in the 5′ to 3′ direction a spacer (1), a gRNA core (2), and an extension arm (3). The extension arm (3) is at the 3′ end of the PEgRNA. The extension arm (3) further comprises in the 5′ to 3′ direction a “primer binding site” (A), an “edit template” (B), and a “homology arm” (C). The extension arm (3) may also comprise an optional modifier region at the 3′ and 5′ ends, which may be the same sequences or different sequences. In addition, the 3′ end of the PEgRNA may comprise a transcriptional terminator sequence. These sequence elements of the PEgRNAs are further described and defined herein.

[0236] In still other embodiments, the PEgRNAs are represented by FIG. 3E, which shows a PEgRNA having in the 5′ to 3′ direction an extension arm (3), a spacer (1), and a gRNA core (2). The extension arm (3) is at the 5′ end of the PEgRNA. The extension arm (3) further comprises in the 3′ to 5′ direction a “primer binding site” (A), an “edit template” (B), and a “homology arm” (C). The extension arm (3) may also comprise an optional modifier region at the 3′ and 5′ ends, which may be the same sequences or different sequences. The PEgRNAs may also comprise a transcriptional terminator sequence at the 3′ end. These sequence elements of the PEgRNAs are further described and defined herein.

### PE1

[0237] As used herein, “PE1” refers to a PE complex comprising a fusion protein comprising Cas9(H840A) and a wild type MMLV RT having the following structure: [NLS]-[Cas9(H840A)]-[linker]-[MMLV_RT(wt)]+a desired PEgRNA, wherein the PE fusion has the amino acid sequence of SEQ ID NO: 123, which is shown as follows;

(SEQ ID NO: 123)
MKRTADGSEFESPKKKRKVDKKYSIGLDIGTNSVGWAVITDEYKVPSKK
FKVLGNTDRHSIKKNLIGALLFDSGETAEATRLKRTARRRYTRRKNRIC
YLQEIFSNEMAKVDDSFFHRLEESFLVEEDKKHERHPIFGNIVDEVAYH
EKYPTIYHLRKKLVDSTDKADLRLIYLALAHMIKFRGHFLIEGDLNPDN
SDVDKLFIQLVQTYNQLFEENPINASGVDAKAILSARLSKSRRLENLIA
QLPGEKKNGLFGNLIALSLGLTPNFKSNFDLAEDAKLQLSKDTYDDDLD
NLLAQIGDQYADLFLAAKNLSDAILLSDILRVNTEITKAPLSASMIKRY
DEHHQDLTLLKALVRQQLPEKYKEIFFDQSKNGYAGYIDGGASQEEFYK
FIKPILEKMDGTEELLVKLNREDLLRKQRTFDNGSIPHQIHLGELHAIL
RRQEDFYPFLKDNREKIEKILTFRIPYYVGPLARGNSRFAWMTRKSEET
ITPWNFEEVVDKGASAQSFIERMTNFDKNLPNEKVLPKHSLLYEYFTVY
NELTKVKYVTEGMRKPAFLSGEQKKAIVDLLFKTNRKVTVKQLKEDYFK
KIECFDSVEISGVEDRFNASLGTYHDLLKIIKDKDFLDNEENEDILEDI
VLTLTLFEDREMIEERLKTYAHLFDDKVMKQLKRRRYTGWGRLSRKLIN
GIRDKQSGKTILDFLKSDGFANRNFMQLIHDDSLTFKEDIQKAQVSGQG
DSLHEHIANLAGSPAIKKGILQTVKVVDELVKVMGRHKPENIVIEMARE
NQTTQKGQKNSRERMKRIEEGIKELGSQILKEHPVENTQLQNEKLYLYY
LQNGRDMYVDQELDINRLSDYDVDAIVPQSFLKDDSIDNKVLTRSDKNR
GKSDNVPSEEVVKKMKNYWRQLLNAKLITQRKFDNLTKAERGGLSELDK
AGFIKRQLVETRQITKHVAQILDSRMNTKYDENDKLIREVKVITLKSKL
VSDFRKDFQFYKVREINNYHHAHDAYLNAVVGTALIKKYPKLESEFVYG
DYKVYDVRKMIAKSEQEIGKATAKYFFYSNIMNFFKTEITLANGEIRKR
PLIETNGETGEIVWDKGRDFATVRKVLSMPQVNIVKKTEVQTGGFSKES
ILPKRNSDKLIARKKDWDPKKYGGFDSPTVAYSVLVVAKVEKGKSKKLK
SVKELLGITIMERSSFEKNPIDFLEAKGYKEVKKDLIIKLPKYSLFELE
NGRKRMLASAGELQKGNELALPSKYVNFLYLASHYEKLKGSPEDNEQKQ
LFVEQHKHYLDEIIEQISEFSKRVILADANLDKVLSAYNKHRDKPIREQ
AENIIHLFTLTNLGAPAAFKYFDTTIDRKRYTSTKEVLDATLIHQSITG
LYETRIDLSQLGGDSGGSSGGSSGSETPGTSESATPESSGGSSGGSSTL
NIEDEYRLHETSKEPDVSLGSTWLSDFPQAWAETGGMGLAVRQAPLIIP
LKATSTPVSIKQYPMSQEARLGIKPHIQRLLDQGILVPCQSPWNTPLLP
VKKPGTNDYRPVQDLREVNKRVEDIHPTVPNPYNLLSGLPPSHQWYTVL
DLKDAFFCLRLHPTSQPLFAFEWRDPEMGISGQLTWTRLPQGFKNSPTL
FDEALHRDLADFRIQHPDLILLQYVDDLLLAATSELDCQQGTRALLQTL
GNLGYRASAKKAQICQKQVKYLGYLLKEGQRWLTEARKETVMGQPTPKT
PRQLREFLGTAGFCRLWIPGFAEMAAPLYPLTKTGTLFNWGPDQQKAYQ
EIKQALLTAPALGLPDLTKPFELFVDEKQGYAKGVLTQKLGPWRRPVAY
LSKKLDPVAAGWPPCLRMVAAIAVLTKDAGKLTMGQPLVILAPHAVEAL
VKQPPDRWLSNARMTHYQALLLDTDRVQFGPVVALNPATLLPLPEEGLQ
HNCLDILAEAHGTRPDLTDQPLPDADHTWYTDGSSLLQEGQRKAGAAVT
TETEVIWAKALPAGTSAQRAELIALTQALKMAEGKKLNVYTDSRYAFAT
AHIHGEIYRRRGLLTSEGKEIKNKDEILALLKALFLPKRLSIIHCPGHQ
KGHSAEARGNRMADQAARKAAITETPDTSTLLIENSSPSGGSKRTADGS
EFEPKKKRKV
KEY:
NUCLEAR LOCALIZATION SEQUENCE (NLS) TOP: (SEQ ID
NO: 124), BOTTOM: (SEQ ID NO: 133)
CAS9(H840A) (SEQ ID NO: 126)
33-AMINO ACID LINKER (SEQ ID NO: 127)
M-MLV reverse transcriptase (SEQ ID NO: 128).

### PE2

[0238] As used herein, “PE2” refers to a PE complex comprising a fusion protein comprising Cas9(H840A) and a variant MMLV RT having the following structure: [NLS]-[Cas9(H840A)]-[linker]-[MMLV_RT(D200N)(T330P)(L603W)(T306K)(W313F)]+a desired PEgRNA, wherein the PE fusion has the amino acid sequence of SEQ ID NO: 134, which is shown as follows:

(SEQ ID NO: 134)
MKRTADGSEFESPKKKRKVDKKYSIGLDIGTNSVGWAVITDEYKVPSKK
FKVLGNTDRHSIKKNLIGALLFDSGETAEATRLKRTARRRYTRRKNRIC
YLQEIFSNEMAKVDDSFFHRLEESFLVEEDKKHERHPIFGNIVDEVAYH
EKYPTIYHLRKKLVDSTDKADLRLIYLALAHMIKFRGHFLIEGDLNPDN
SDVDKLFIQLVQTYNQLFEENPINASGVDAKAILSARLSKSRRLENLIA
QLPGEKKNGLFGNLIALSLGLTPNFKSNFDLAEDAKLQLSKDTYDDDLD
NLLAQIGDQYADLFLAAKNLSDAILLSDILRVNTEITKAPLSASMIKRY
DEHHQDLTLLKALVRQQLPEKYKEIFFDQSKNGYAGYIDGGASQEEFYK
FIKPILEKMDGTEELLVKLNREDLLRKQRTFDNGSIPHQIHLGELHAIL
RRQEDFYPFLKDNREKIEKILTFRIPYYVGPLARGNSRFAWMTRKSEET
ITPWNFEEVVDKGASAQSFIERMTNFDKNLPNEKVLPKHSLLYEYFTVY
NELTKVKYVTEGMRKPAFLSGEQKKAIVDLLFKTNRKVTVKQLKEDYFK
KIECFDSVEISGVEDRFNASLGTYHDLLKIIKDKDFLDNEENEDILEDI
VLTLTLFEDREMIEERLKTYAHLFDDKVMKQLKRRRYTGWGRLSRKLIN
GIRDKQSGKTILDFLKSDGFANRNFMQLIHDDSLTFKEDIQKAQVSGQG
DSLHEHIANLAGSPAIKKGILQTVKVVDELVKVMGRHKPENIVIEMARE
NQTTQKGQKNSRERMKRIEEGIKELGSQILKEHPVENTQLQNEKLYLYY
LQNGRDMYVDQELDINRLSDYDVDAIVPQSFLKDDSIDNKVLTRSDKNR
GKSDNVPSEEVVKKMKNYWRQLLNAKLITQRKFDNLTKAERGGLSELDK
AGFIKRQLVETRQITKHVAQILDSRMNTKYDENDKLIREVKVITLKSKL
VSDFRKDFQFYKVREINNYHHAHDAYLNAVVGTALIKKYPKLESEFVYG
DYKVYDVRKMIAKSEQEIGKATAKYFFYSNIMNFFKTEITLANGEIRKR
PLIETNGETGEIVWDKGRDFATVRKVLSMPQVNIVKKTEVQTGGFSKES
ILPKRNSDKLIARKKDWDPKKYGGFDSPTVAYSVLVVAKVEKGKSKKLK
SVKELLGITIMERSSFEKNPIDFLEAKGYKEVKKDLIIKLPKYSLFELE
NGRKRMLASAGELQKGNELALPSKYVNFLYLASHYEKLKGSPEDNEQKQ
LFVEQHKHYLDEIIEQISEFSKRVILADANLDKVLSAYNKHRDKPIREQ
AENIIHLFTLTNLGAPAAFKYFDTTIDRKRYTSTKEVLDATLIHQSITG
LYETRIDLSQLGGDSGGSSGGSSGSETPGTSESATPESSGGSSGGSSTL
NIEDEYRLHETSKEPDVSLGSTWLSDFPQAWAETGGMGLAVRQAPLIIP
LKATSTPVSIKQYPMSQEARLGIKPHIQRLLDQGILVPCQSPWNTPLLP
VKKPGTNDYRPVQDLREVNKRVEDIHPTVPNPYNLLSGLPPSHQWYTVL
DLKDAFFCLRLHPTSQPLFAFEWRDPEMGISGQLTWTRLPQGFKNSPTL
FNEALHRDLADFRIQHPDLILLQYVDDLLLAATSELDCQQGTRALLQTL
GNLGYRASAKKAQICQKQVKYLGYLLKEGQRWLTEARKETVMGQPTPKT
PRQLREFLGKAGFCRLFIPGFAEMAAPLYPLTKPGTLFNWGPDQQKAYQ
EIKQALLTAPALGLPDLTKPFELFVDEKQGYAKGVLTQKLGPWRRPVAY
LSKKLDPVAAGWPPCLRMVAAIAVLTKDAGKLTMGQPLVILAPHAVEAL
VKQPPDRWLSNARMTHYQALLLDTDRVQFGPVVALNPATLLPLPEEGLQ
HNCLDILAEAHGTRPDLTDQPLPDADHTWYTDGSSLLQEGQRKAGAAVT
TETEVIWAKALPAGTSAQRAELIALTQALKMAEGKKLNVYTDSRYAFAT
AHIHGEIYRRRGWLTSEGKEIKNKDEILALLKALFLPKRLSIIHCPGHQ
KGHSAEARGNRMADQAARKAAITETPDTSTLLIENSSPSGGSKRTADGS
EFEPKKKRKV
KEY:
NUCLEAR LOCALIZATION SEQUENCE (NLS) TOP: (SEQ ID
NO: 124), BOTTOM: (SEQ ID NO: 133)
CAS9(H840A) (SEQ ID NO: 137)
33-AMINO ACID LINKER (SEQ ID NO: 127)
M-MLV reverse transcriptase (SEQ ID NO: 139).

### PE3

[0239] As used herein, “PE3” refers to PE2 plus a second-strand nicking guide RNA that complexes with the PE2 and introduces a nick in the non-edited DNA strand in order to induce preferential replacement of the edited strand.

### PE3b

[0240] As used herein, “PE3b” refers to PE3 but wherein the second-strand nicking guide RNA is designed for temporal control such that the second strand nick is not introduced until after the installation of the desired edit. This is achieved by designing a gRNA with a spacer sequence that matches only the edited strand, but not the original allele. Using this strategy, referred to hereafter as PE3b, mismatches between the protospacer and the unedited allele should disfavor nicking by the sgRNA until after the editing event on the PAM strand takes place.

### PE-Short

[0241] As used herein, “PE-short” refers to a PE construct that is fused to a C-terminally truncated reverse transcriptase, and has the following amino acid sequence:

(SEQ ID NO: 765)
MKRTADGSEFESPKKKRKVDKKYSIGLDIGTNSVGWAVITDEYKVPSKK
FKVLGNTDRHSIKKNLIGALLFDSGETAEATRLKRTARRRYTRRKNRIC
YLQEIFSNEMAKVDDSFFHRLEESFLVEEDKKHERHPIFGNIVDEVAYH
EKYPTIYHLRKKLVDSTDKADLRLIYLALAHMIKFRGHFLIEGDLNPDN
SDVDKLFIQLVQTYNQLFEENPINASGVDAKAILSARLSKSRRLENLIA
QLPGEKKNGLFGNLIALSLGLTPNFKSNFDLAEDAKLQLSKDTYDDDLD
NLLAQIGDQYADLFLAAKNLSDAILLSDILRVNTEITKAPLSASMIKRY
DEHHQDLTLLKALVRQQLPEKYKEIFFDQSKNGYAGYIDGGASQEEFYK
FIKPILEKMDGTEELLVKLNREDLLRKQRTFDNGSIPHQIHLGELHAIL
RRQEDFYPFLKDNREKIEKILTFRIPYYVGPLARGNSRFAWMTRKSEET
ITPWNFEEVVDKGASAQSFIERMTNFDKNLPNEKVLPKHSLLYEYFTVY
NELTKVKYVTEGMRKPAFLSGEQKKAIVDLLFKTNRKVTVKQLKEDYFK
KIECFDSVEISGVEDRFNASLGTYHDLLKIIKDKDFLDNEENEDILEDI
VLTLTLFEDREMIEERLKTYAHLFDDKVMKQLKRRRYTGWGRLSRKLIN
GIRDKQSGKTILDFLKSDGFANRNFMQLIHDDSLTFKEDIQKAQVSGQG
DSLHEHIANLAGSPAIKKGILQTVKVVDELVKVMGRHKPENIVIEMARE
NQTTQKGQKNSRERMKRIEEGIKELGSQILKEHPVENTQLQNEKLYLYY
LQNGRDMYVDQELDINRLSDYDVDAIVPQSFLKDDSIDNKVLTRSDKNR
GKSDNVPSEEVVKKMKNYWRQLLNAKLITQRKFDNLTKAERGGLSELDK
AGFIKRQLVETRQITKHVAQILDSRMNTKYDENDKLIREVKVITLKSKL
VSDFRKDFQFYKVREINNYHHAHDAYLNAVVGTALIKKYPKLESEFVYG
DYKVYDVRKMIAKSEQEIGKATAKYFFYSNIMNFFKTEITLANGEIRKR
PLIETNGETGEIVWDKGRDFATVRKVLSMPQVNIVKKTEVQTGGFSKES
ILPKRNSDKLIARKKDWDPKKYGGFDSPTVAYSVLVVAKVEKGKSKKLK
SVKELLGITIMERSSFEKNPIDFLEAKGYKEVKKDLIIKLPKYSLFELE
NGRKRMLASAGELQKGNELALPSKYVNFLYLASHYEKLKGSPEDNEQKQ
LFVEQHKHYLDEIIEQISEFSKRVILADANLDKVLSAYNKHRDKPIREQ
AENIIHLFTLTNLGAPAAFKYFDTTIDRKRYTSTKEVLDATLIHQSITG
LYETRIDLSQLGGDSGGSSGGSSGSETPGTSESATPESSGGSSGGSSTL
NIEDEYRLHETSKEPDVSLGSTWLSDFPQAWAETGGMGLAVRQAPLIIP
LKATSTPVSIKQYPMSQEARLGIKPHIQRLLDQGILVPCQSPWNTPLLP
VKKPGTNDYRPVQDLREVNKRVEDIHPTVPNPYNLLSGLPPSHQWYTVL
DLKDAFFCLRLHPTSQPLFAFEWRDPEMGISGQLTWTRLPQGFKNSPTL
FNEALHRDLADFRIQHPDLILLQYVDDLLLAATSELDCQQGTRALLQTL
GNLGYRASAKKAQICQKQVKYLGYLLKEGQRWLTEARKETVMGQPTPKT
PRQLREFLGKAGFCRLFIPGFAEMAAPLYPLTKPGTLFNWGPDQQKAYQ
EIKQALLTAPALGLPDLTKPFELFVDEKQGYAKGVLTQKLGPWRRPVAY
LSKKLDPVAAGWPPCLRMVAAIAVLTKDAGKLTMGQPLVILAPHAVEAL
VKQPPDRWLSNARMTHYQALLLDTDRVQFGPVVALNPATLLPLPEEGLQ
HNCLDNSRLINSGGSKRTADGSEFEPKKKRKV
KEY:
NUCLEAR LOCALIZATION SEQUENCE (NLS) TOP: (SEQ ID
NO: 124), BOTTOM: (SEQ ID NO: 133)
CAS9(H840A) (SEQ ID NO: 157)
33-AMINO ACID LINKER 1 (SEQ ID NO: 127)
M-MLV TRUNCATED REVERSE TRANSCRIPTASE
(SEQ ID NO: 766)

### Peptide Tag

[0242] The term “peptide tag” refers to a peptide amino acid sequence that is genetically fused to a protein sequence to impart one or more functions onto the proteins that facilitate the manipulation of the protein for various purposes, such as, visualization, purification, solubilization, and separation, etc. Peptide tags can include various types of tags categorized by purpose or function, which may include “affinity tags” (to facilitate protein purification), “solubilization tags” (to assist in proper folding of proteins), “chromatography tags” (to alter chromatographic properties of proteins), “epitope tags” (to bind to high affinity antibodies), “fluorescence tags” (to facilitate visualization of proteins in a cell or in vitro).

### Polymerase

[0243] As used herein, the term “polymerase” refers to an enzyme that synthesizes a nucleotide strand and which may be used in connection with the prime editor systems described herein. The polymerase can be a “template-dependent” polymerase (i.e., a polymerase which synthesizes a nucleotide strand based on the order of nucleotide bases of a template strand). The polymerase can also be a “template-independent” polymerase (i.e., a polymerase which synthesizes a nucleotide strand without the requirement of a template strand). A polymerase may also be further categorized as a “DNA polymerase” or an “RNA polymerase.” In various embodiments, the prime editor system comprises a DNA polymerase. In various embodiments, the DNA polymerase can be a “DNA-dependent DNA polymerase” (i.e., whereby the template molecule is a strand of DNA). In such cases, the DNA template molecule can be a PEgRNA, wherein the extension arm comprises a strand of DNA. In such cases, the PEgRNA may be referred to as a chimeric or hybrid PEgRNA which comprises an RNA portion (i.e., the guide RNA components, including the spacer and the gRNA core) and a DNA portion (i.e., the extension arm). In various other embodiments, the DNA polymerase can be an “RNA-dependent DNA polymerase” (i.e., whereby the template molecule is a strand of RNA). In such cases, the PEgRNA is RNA, i.e., including an RNA extension. The term “polymerase” may also refer to an enzyme that catalyzes the polymerization of nucleotide (i.e., the polymerase activity). Generally, the enzyme will initiate synthesis at the 3′-end of a primer annealed to a polynucleotide template sequence (e.g., such as a primer sequence annealed to the primer binding site of a PEgRNA), and will proceed toward the 5′ end of the template strand. A “DNA polymerase” catalyzes the polymerization of deoxynucleotides. As used herein in reference to a DNA polymerase, the term DNA polymerase includes a “functional fragment thereof”. A “functional fragment thereof” refers to any portion of a wild-type or mutant DNA polymerase that encompasses less than the entire amino acid sequence of the polymerase and which retains the ability, under at least one set of conditions, to catalyze the polymerization of a polynucleotide. Such a functional fragment may exist as a separate entity, or it may be a constituent of a larger polypeptide, such as a fusion protein.

### Prime Editing

[0244] As used herein, the term “prime editing” refers to a novel approach for gene editing using napDNAbps, a polymerase (e.g., a reverse transcriptase), and specialized guide RNAs that include a DNA synthesis template for encoding desired new genetic information (or deleting genetic information) that is then incorporated into a target DNA sequence. Certain embodiments of prime editing are described in the embodiments of FIGS. 1A-1H and FIG. 72(a)-72(c), among other figures.

[0245] Prime editing represents an entirely new platform for genome editing that is a versatile and precise genome editing method that directly writes new genetic information into a specified DNA site using a nucleic acid programmable DNA binding protein (“napDNAbp”) working in association with a polymerase (i.e., in the form of a fusion protein or otherwise provided in trans with the napDNAbp), wherein the prime editing system is programmed with a prime editing (PE) guide RNA (“PEgRNA”) that both specifies the target site and templates the synthesis of the desired edit in the form of a replacement DNA strand by way of an extension (either DNA or RNA) engineered onto a guide RNA (e.g., at the 5′ or 3′ end, or at an internal portion of a guide RNA). The replacement strand containing the desired edit (e.g., a single nucleobase substitution) shares the same (or is homologous to) sequence as the endogenous strand (immediately downstream of the nick site) of the target site to be edited (with the exception that it includes the desired edit). Through DNA repair and/or replication machinery, the endogenous strand downstream of the nick site is replaced by the newly synthesized replacement strand containing the desired edit. In some cases, prime editing may be thought of as a “search-and-replace” genome editing technology since the prime editors, as described herein, not only search and locate the desired target site to be edited, but at the same time, encode a replacement strand containing a desired edit which is installed in place of the corresponding target site endogenous DNA strand. The prime editors of the present disclosure relate, in part, to the discovery that the mechanism of target-primed reverse transcription (TPRT) or “prime editing” can be leveraged or adapted for conducting precision CRISPR/Cas-based genome editing with high efficiency and genetic flexibility (e.g., as depicted in various embodiments of FIGS. 1A-1F). TPRT is naturally used by mobile DNA elements, such as mammalian non-LTR retrotransposons and bacterial Group II introns^{28,29}. The inventors have herein used Cas protein-reverse transcriptase fusions or related systems to target a specific DNA sequence with a guide RNA, generate a single strand nick at the target site, and use the nicked DNA as a primer for reverse transcription of an engineered reverse transcriptase template that is integrated with the guide RNA. However, while the concept begins with prime editors that use reverse transcriptase as the DNA polymerase component, the prime editors described herein are not limited to reverse transcriptases but may include the use of virtually any DNA polymerase. Indeed, while the application throughout may refer to prime editors with “reverse transcriptases,” it is set forth here that reverse transcriptases are only one type of DNA polymerase that may work with prime editing. Thus, where ever the specification mentions a “reverse transcriptase,” the person having ordinary skill in the art should appreciate that any suitable DNA polymerase may be used in place of the reverse transcriptase. Thus, in one aspect, the prime editors may comprise Cas9 (or an equivalent napDNAbp) which is programmed to target a DNA sequence by associating it with a specialized guide RNA (i.e., PEgRNA) containing a spacer sequence that anneals to a complementary protospacer in the target DNA. The specialized guide RNA also contains new genetic information in the form of an extension that encodes a replacement strand of DNA containing a desired genetic alteration which is used to replace a corresponding endogenous DNA strand at the target site. To transfer information from the PEgRNA to the target DNA, the mechanism of prime editing involves nicking the target site in one strand of the DNA to expose a 3′-hydroxyl group. The exposed 3′-hydroxyl group can then be used to prime the DNA polymerization of the edit-encoding extension on PEgRNA directly into the target site. In various embodiments, the extension-which provides the template for polymerization of the replacement strand containing the edit—can be formed from RNA or DNA. In the case of an RNA extension, the polymerase of the prime editor can be an RNA-dependent DNA polymerase (such as, a reverse transcriptase). In the case of a DNA extension, the polymerase of the prime editor may be a DNA-dependent DNA polymerase. The newly synthesized strand (i.e., the replacement DNA strand containing the desired edit) that is formed by the herein disclosed prime editors would be homologous to the genomic target sequence (i.e., have the same sequence as) except for the inclusion of a desired nucleotide change (e.g., a single nucleotide change, a deletion, or an insertion, or a combination thereof). The newly synthesized (or replacement) strand of DNA may also be referred to as a single strand DNA flap, which would compete for hybridization with the complementary homologous endogenous DNA strand, thereby displacing the corresponding endogenous strand. In certain embodiments, the system can be combined with the use of an error-prone reverse transcriptase enzyme (e.g., provided as a fusion protein with the Cas9 domain, or provided in trans to the Cas9 domain). The error-prone reverse transcriptase enzyme can introduce alterations during synthesis of the single strand DNA flap. Thus, in certain embodiments, error-prone reverse transcriptase can be utilized to introduce nucleotide changes to the target DNA. Depending on the error-prone reverse transcriptase that is used with the system, the changes can be random or non-random. Resolution of the hybridized intermediate (comprising the single strand DNA flap synthesized by the reverse transcriptase hybridized to the endogenous DNA strand) can include removal of the resulting displaced flap of endogenous DNA (e.g., with a 5′ end DNA flap endonuclease, FEN1), ligation of the synthesized single strand DNA flap to the target DNA, and assimilation of the desired nucleotide change as a result of cellular DNA repair and/or replication processes. Because templated DNA synthesis offers single nucleotide precision for the modification of any nucleotide, including insertions and deletions, the scope of this approach is very broad and could foreseeably be used for myriad applications in basic science and therapeutics.

[0246] In various embodiments, prime editing operates by contacting a target DNA molecule (for which a change in the nucleotide sequence is desired to be introduced) with a nucleic acid programmable DNA binding protein (napDNAbp) complexed with a prime editing guide RNA (PEgRNA). In reference to FIG. 1G, the prime editing guide RNA (PEgRNA) comprises an extension at the 3′ or 5′ end of the guide RNA, or at an intramolecular location in the guide RNA and encodes the desired nucleotide change (e.g., single nucleotide change, insertion, or deletion). In step (a), the napDNAbp/extended gRNA complex contacts the DNA molecule and the extended gRNA guides the napDNAbp to bind to a target locus. In step (b), a nick in one of the strands of DNA of the target locus is introduced (e.g., by a nuclease or chemical agent), thereby creating an available 3′ end in one of the strands of the target locus. In certain embodiments, the nick is created in the strand of DNA that corresponds to the R-loop strand, i.e., the strand that is not hybridized to the guide RNA sequence, i.e., the “non-target strand.” The nick, however, could be introduced in either of the strands. That is, the nick could be introduced into the R-loop “target strand” (i.e., the strand hybridized to the protospacer of the extended gRNA) or the “non-target strand” (i.e., the strand forming the single-stranded portion of the R-loop and which is complementary to the target strand). In step (c), the 3′ end of the DNA strand (formed by the nick) interacts with the extended portion of the guide RNA in order to prime reverse transcription (i.e., “target-primed RT”). In certain embodiments, the 3′ end DNA strand hybridizes to a specific RT priming sequence on the extended portion of the guide RNA, i.e., the “reverse transcriptase priming sequence” or “primer binding site” on the PEgRNA. In step (d), a reverse transcriptase (or other suitable DNA polymerase) is introduced which synthesizes a single strand of DNA from the 3′ end of the primed site towards the 5′ end of the prime editing guide RNA. The DNA polymerase (e.g., reverse transcriptase) can be fused to the napDNAbp or alternatively can be provided in trans to the napDNAbp. This forms a single-strand DNA flap comprising the desired nucleotide change (e.g., the single base change, insertion, or deletion, or a combination thereof) and which is otherwise homologous to the endogenous DNA at or adjacent to the nick site. In step (e), the napDNAbp and guide RNA are released. Steps (f) and (g) relate to the resolution of the single strand DNA flap such that the desired nucleotide change becomes incorporated into the target locus. This process can be driven towards the desired product formation by removing the corresponding 5′ endogenous DNA flap that forms once the 3′ single strand DNA flap invades and hybridizes to the endogenous DNA sequence. Without being bound by theory, the cells endogenous DNA repair and replication processes resolves the mismatched DNA to incorporate the nucleotide change(s) to form the desired altered product. The process can also be driven towards product formation with “second strand nicking,” as exemplified in FIG. 1F. This process may introduce at least one or more of the following genetic changes: transversions, transitions, deletions, and insertions.

[0247] The term “prime editor (PE) system” or “prime editor (PE)” or “PE system” or “PE editing system” refers the compositions involved in the method of genome editing using target-primed reverse transcription (TPRT) describe herein, including, but not limited to the napDNAbps, reverse transcriptases, fusion proteins (e.g., comprising napDNAbps and reverse transcriptases), prime editing guide RNAs, and complexes comprising fusion proteins and prime editing guide RNAs, as well as accessory elements, such as second strand nicking components (e.g., second strand sgRNAs) and 5′ endogenous DNA flap removal endonucleases (e.g., FEN1) for helping to drive the prime editing process towards the edited product formation.

[0248] Although in the embodiments described thus far the PEgRNA constitutes a single molecule comprising a guide RNA (which itself comprises a spacer sequence and a gRNA core or scaffold) and a 5′ or 3′ extension arm comprising the primer binding site and a DNA synthesis template (e.g., see FIG. 3D, the PEgRNA may also take the form of two individual molecules comprised of a guide RNA and a trans prime editor RNA template (tPERT), which essentially houses the extension arm (including, in particular, the primer binding site and the DNA synthesis domain) and an RNA-protein recruitment domain (e.g., MS2 aptamer or hairpin) in the same molecule which becomes co-localized or recruited to a modified prime editor complex that comprises a tPERT recruiting protein (e.g., MS2cp protein, which binds to the MS2 aptamer). See FIG. 3G and FIG. 3H as an example of a tPERT that may be used with prime editing.

### Prime Editor

[0249] The term “prime editor” refers to the herein described fusion constructs comprising a napDNAbp (e.g., Cas9 nickase) and a reverse transcriptase and is capable of carrying out prime editing on a target nucleotide sequence in the presence of a PEgRNA (or “extended guide RNA”). The term “prime editor” may refer to the fusion protein or to the fusion protein complexed with a PEgRNA, and/or further complexed with a second-strand nicking sgRNA. In some embodiments, the prime editor may also refer to the complex comprising a fusion protein (reverse transcriptase fused to a napDNAbp), a PEgRNA, and a regular guide RNA capable of directing the second-site nicking step of the non-edited strand as described herein. In other embodiments, the reverse transcriptase component of the “primer editor” may be provided in trans.

### Primer Binding Site

[0250] The term “primer binding site” or “the PBS” refers to the nucleotide sequence located on a PEgRNA as component of the extension arm (typically at the 3′ end of the extension arm) and serves to bind to the primer sequence that is formed after Cas9 nicking of the target sequence by the prime editor. As detailed elsewhere, when the Cas9 nickase component of a prime editor nicks one strand of the target DNA sequence, a 3′-ended ssDNA flap is formed, which serves a primer sequence that anneals to the primer binding site on the PEgRNA to prime reverse transcription. FIGS. 27 and 28 show embodiments of the primer binding site located on a 3′ and 5′ extension arm, respectively.

### Promoter

[0251] The term “promoter” is art-recognized and refers to a nucleic acid molecule with a sequence recognized by the cellular transcription machinery and able to initiate transcription of a downstream gene. A promoter can be constitutively active, meaning that the promoter is always active in a given cellular context, or conditionally active, meaning that the promoter is only active in the presence of a specific condition. For example, a conditional promoter may only be active in the presence of a specific protein that connects a protein associated with a regulatory element in the promoter to the basic transcriptional machinery, or only in the absence of an inhibitory molecule. A subclass of conditionally active promoters are inducible promoters that require the presence of a small molecule “inducer” for activity. Examples of inducible promoters include, but are not limited to, arabinose-inducible promoters, Tet-on promoters, and tamoxifen-inducible promoters. A variety of constitutive, conditional, and inducible promoters are well known to the skilled artisan, and the skilled artisan will be able to ascertain a variety of such promoters useful in carrying out the instant invention, which is not limited in this respect.

### Protospacer

[0252] As used herein, the term “protospacer” refers to the sequence (˜20 bp) in DNA adjacent to the PAM (protospacer adjacent motif) sequence. The protospacer shares the same sequence as the spacer sequence of the guide RNA. The guide RNA anneals to the complement of the protospacer sequence on the target DNA (specifically, one strand thereof, i.e., the “target strand” versus the “non-target strand” of the target DNA sequence). In order for Cas9 to function it also requires a specific protospacer adjacent motif (PAM) that varies depending on the bacterial species of the Cas9 gene. The most commonly used Cas9 nuclease, derived from S. pyogenes, recognizes a PAM sequence of NGG that is found directly downstream of the target sequence in the genomic DNA, on the non-target strand. The skilled person will appreciate that the literature in the state of the art sometimes refers to the “protospacer” as the ˜20-nt target-specific guide sequence on the guide RNA itself, rather than referring to it as a “spacer.” Thus, in some cases, the term “protospacer” as used herein may be used interchangeably with the term “spacer.” The context of the description surrounding the appearance of either “protospacer” or “spacer” will help inform the reader as to whether the term is in reference to the gRNA or the DNA target.

### Protospacer Adjacent Motif (PAM)

[0253] As used herein, the term “protospacer adjacent sequence” or “PAM” refers to an approximately 2-6 base pair DNA sequence that is an important targeting component of a Cas9 nuclease. Typically, the PAM sequence is on either strand, and is downstream in the 5′ to 3′ direction of Cas9 cut site. The canonical PAM sequence (i.e., the PAM sequence that is associated with the Cas9 nuclease of Streptococcus pyogenes or SpCas9) is 5′-NGG-3′ wherein “N” is any nucleobase followed by two guanine (“G”) nucleobases. Different PAM sequences can be associated with different Cas9 nucleases or equivalent proteins from different organisms. In addition, any given Cas9 nuclease, e.g., SpCas9, may be modified to alter the PAM specificity of the nuclease such that the nuclease recognizes alternative PAM sequence.

[0254] For example, with reference to the canonical SpCas9 amino acid sequence is SEQ ID NO: 18, the PAM sequence can be modified by introducing one or more mutations, including (a) D1135V, R1335Q, and T1337R “the VQR variant”, which alters the PAM specificity to NGAN or NGNG, (b) D1135E, R1335Q, and T1337R “the EQR variant”, which alters the PAM specificity to NGAG, and (c) D1135V, G1218R, R1335E, and T1337R “the VRER variant”, which alters the PAM specificity to NGCG. In addition, the D1135E variant of canonical SpCas9 still recognizes NGG, but it is more selective compared to the wild type SpCas9 protein.

[0255] It will also be appreciated that Cas9 enzymes from different bacterial species (i.e., Cas9 orthologs) can have varying PAM specificities. For example, Cas9 from Staphylococcus aureus (SaCas9) recognizes NGRRT or NGRRN. In addition, Cas9 from Neisseria meningitis (NmCas) recognizes NNNNGATT. In another example, Cas9 from Streptococcus thermophilis (StCas9) recognizes NNAGAAW. In still another example, Cas9 from Treponema denticola (TdCas) recognizes NAAAAC. These are example are not meant to be limiting. It will be further appreciated that non-SpCas9s bind a variety of PAM sequences, which makes them useful when no suitable SpCas9 PAM sequence is present at the desired target cut site. Furthermore, non-SpCas9s may have other characteristics that make them more useful than SpCas9. For example, Cas9 from Staphylococcus aureus (SaCas9) is about 1 kilobase smaller than SpCas9, so it can be packaged into adeno-associated virus (AAV). Further reference may be made to Shah et al., “Protospacer recognition motifs: mixed identities and functional diversity,” RNA Biology, 10(5): 891-899 (which is incorporated herein by reference).

### Recombinase

[0256] The term “recombinase,” as used herein, refers to a site-specific enzyme that mediates the recombination of DNA between recombinase recognition sequences, which results in the excision, integration, inversion, or exchange (e.g., translocation) of DNA fragments between the recombinase recognition sequences. Recombinases can be classified into two distinct families: serine recombinases (e.g., resolvases and invertases) and tyrosine recombinases (e.g., integrases). Examples of serine recombinases include, without limitation, Hin, Gin, Tn3, β-six, CinH, ParA, γδ, Bxb1, ϕC31, TP901, TG1, φBT1, R4, φRV1, φFC1, MR11, A118, U153, and gp29. Examples of tyrosine recombinases include, without limitation, Cre, FLP, R, Lambda, HK101, HK022, and pSAM2. The serine and tyrosine recombinase names stem from the conserved nucleophilic amino acid residue that the recombinase uses to attack the DNA and which becomes covalently linked to the DNA during strand exchange. Recombinases have numerous applications, including the creation of gene knockouts/knock-ins and gene therapy applications. See, e.g., Brown et al., “Serine recombinases as tools for genome engineering.” Methods. 2011; 53(4):372-9; Hirano et al., “Site-specific recombinases as tools for heterologous gene integration.” Appl. Microbiol. Biotechnol. 2011; 92(2):227-39; Chavez and Calos, “Therapeutic applications of the ΦC31 integrase system.” Curr. Gene Ther. 2011; 11(5):375-81; Turan and Bode, “Site-specific recombinases: from tag-and-target-to tag-and-exchange-based genomic modifications.” FASEB J. 2011; 25(12):4088-107; Venken and Bellen, “Genome-wide manipulations of Drosophila melanogaster with transposons, Flp recombinase, and ΦC31 integrase.” Methods Mol. Biol. 2012; 859:203-28; Murphy, “Phage recombinases and their applications.” Adv. Virus Res. 2012; 83:367-414; Zhang et al., “Conditional gene manipulation: Cre-ating a new biological era.” J. Zhejiang Univ. Sci. B. 2012; 13(7):511-24; Karpenshif and Bernstein, “From yeast to mammals: recent advances in genetic control of homologous recombination.” DNA Repair (Amst). 2012; 1; 11(10):781-8; the entire contents of each are hereby incorporated by reference in their entirety. The recombinases provided herein are not meant to be exclusive examples of recombinases that can be used in embodiments of the invention. The methods and compositions of the invention can be expanded by mining databases for new orthogonal recombinases or designing synthetic recombinases with defined DNA specificities (See, e.g., Groth et al., “Phage integrases: biology and applications.” J. Mol. Biol. 2004; 335, 667-678; Gordley et al., “Synthesis of programmable integrases.” Proc. Natd. Acad. Sci. USA. 2009; 106, 5053-5058; the entire contents of each are hereby incorporated by reference in their entirety). Other examples of recombinases that are useful in the methods and compositions described herein are known to those of skill in the art, and any new recombinase that is discovered or generated is expected to be able to be used in the different embodiments of the invention. In some embodiments, the catalytic domains of a recombinase are fused to a nuclease-inactivated RNA-programmable nuclease (e.g., dCas9, or a fragment thereof), such that the recombinase domain does not comprise a nucleic acid binding domain or is unable to bind to a target nucleic acid (e.g., the recombinase domain is engineered such that it does not have specific DNA binding activity). Recombinases lacking DNA binding activity and methods for engineering such are known, and include those described by Klippel et al., “Isolation and characterisation of unusual gin mutants.” EMBO J. 1988; 7: 3983-3989: Burke et al., “Activating mutations of Tn3 resolvase marking interfaces important in recombination catalysis and its regulation. Mol Microbiol. 2004; 51: 937-948; Olorunniji et al., “Synapsis and catalysis by activated Tn3 resolvase mutants.” Nucleic Acids Res. 2008; 36: 7181-7191; Rowland et al., “Regulatory mutations in Sin recombinase support a structure-based model of the synaptosome.” Mol Microbiol. 2009; 74: 282-298; Akopian et al., “Chimeric recombinases with designed DNA sequence recognition.” Proc Nat Acad Sci USA. 2003; 100: 8688-8691; Gordley et al., “Evolution of programmable zinc finger-recombinases with activity in human cells. J Mol Biol. 2007; 367: 802-813; Gordley et al., “Synthesis of programmable integrases.” Proc Natl Acad Sci USA. 2009; 106: 5053-5058; Arnold et al., “Mutants of Tn3 resolvase which do not require accessory binding sites for recombination activity.” EMBO J. 1999; 18: 1407-1414; Gaj et al., “Structure-guided reprogramming of serine recombinase DNA sequence specificity.” Proc Nat Acad Sci USA. 2011; 108(2):498-503; and Proudfoot et al., “Zinc finger recombinases with adaptable DNA sequence specificity.” PLoS One. 2011; 6(4):e19537; the entire contents of each are hereby incorporated by reference. For example, serine recombinases of the resolvase-invertase group, e.g., Tn3 and γδ resolvases and the Hin and Gin invertases, have modular structures with autonomous catalytic and DNA-binding domains (See, e.g., Grindley et al., “Mechanism of site-specific recombination.” Ann Rev Biochem. 2006; 75: 567-605, the entire contents of which are incorporated by reference). The catalytic domains of these recombinases are thus amenable to being recombined with nuclease-inactivated RNA-programmable nucleases (e.g., dCas9, or a fragment thereof) as described herein, e.g., following the isolation of ‘activated’ recombinase mutants which do not require any accessory factors (e.g., DNA binding activities) (See, e.g., Klippel et al., “Isolation and characterisation of unusual gin mutants.” EMBO J. 1988; 7: 3983-3989: Burke et al., “Activating mutations of Tn3 resolvase marking interfaces important in recombination catalysis and its regulation. Mol Microbiol. 2004; 51: 937-948; Olorunniji et al., “Synapsis and catalysis by activated Tn3 resolvase mutants.” Nucleic Acids Res. 2008; 36: 7181-7191; Rowland et al., “Regulatory mutations in Sin recombinase support a structure-based model of the synaptosome.” Mol Microbiol. 2009; 74: 282-298; Akopian et al., “Chimeric recombinases with designed DNA sequence recognition.” Proc Natl Acad Sci USA. 2003; 100: 8688-8691). Additionally, many other natural serine recombinases having an N-terminal catalytic domain and a C-terminal DNA binding domain are known (e.g., phiC31 integrase, TnpX transposase, IS607 transposase), and their catalytic domains can be co-opted to engineer programmable site-specific recombinases as described herein (See, e.g., Smith et al., “Diversity in the serine recombinases.” Mol Microbiol. 2002; 44: 299-307, the entire contents of which are incorporated by reference). Similarly, the core catalytic domains of tyrosine recombinases (e.g., Cre, X integrase) are known, and can be similarly co-opted to engineer programmable site-specific recombinases as described herein (See, e.g., Guo et al., “Structure of Cre recombinase complexed with DNA in a site-specific recombination synapse.” Nature. 1997; 389:40-46; Hartung et al., “Cre mutants with altered DNA binding properties.” J Biol Chem 1998; 273:22884-22891; Shaikh et al., “Chimeras of the Flp and Cre recombinases: Tests of the mode of cleavage by Flp and Cre. J Mol Biol. 2000; 302:27-48; Rongrong et al., “Effect of deletion mutation on the recombination activity of Cre recombinase.” Acta Biochim Pol. 2005; 52:541-544; Kilbride et al., “Determinants of product topology in a hybrid Cre-Tn3 resolvase site-specific recombination system.” J Mol Biol. 2006; 355:185-195; Warren et al., “A chimeric cre recombinase with regulated directionality.” Proc Natl Acad Sci USA. 2008 105:18278-18283; Van Duyne, “Teaching Cre to follow directions.” Proc Natl Acad Sci USA. 2009 Jan. 6; 106(1):4-5; Numrych et al., “A comparison of the effects of single-base and triple-base changes in the integrase arm-type binding sites on the site-specific recombination of bacteriophage X.” Nucleic Acids Res. 1990; 18:3953-3959; Tirumalai et al., “The recognition of core-type DNA sites by X integrase.” J Mol Biol. 1998; 279:513-527; Aihara et al., “A conformational switch controls the DNA cleavage activity of X integrase.” Mol Cell. 2003; 12:187-198; Biswas et al., “A structural basis for allosteric control of DNA recombination by X integrase.” Nature. 2005; 435:1059-1066; and Warren et al., “Mutations in the amino-terminal domain of λ-integrase have differential effects on integrative and excisive recombination.” Mol Microbiol. 2005; 55:1104-1112; the entire contents of each are incorporated by reference).

### Recombinase Recognition Sequence

[0257] The term “recombinase recognition sequence”, or equivalently as “RRS” or “recombinase target sequence”, as used herein, refers to a nucleotide sequence target recognized by a recombinase and which undergoes strand exchange with another DNA molecule having a the RRS that results in excision, integration, inversion, or exchange of DNA fragments between the recombinase recognition sequences.

### Recombine or Recombination

[0258] The term “recombine,” or “recombination,” in the context of a nucleic acid modification (e.g., a genomic modification), is used to refer to the process by which two or more nucleic acid molecules, or two or more regions of a single nucleic acid molecule, are modified by the action of a recombinase protein (e.g., an inventive recombinase fusion protein provided herein). Recombination can result in, inter alia, the insertion, inversion, excision, or translocation of nucleic acids, e.g., in or between one or more nucleic acid molecules. recombinase recognition sequences

### Reverse Transcriptase

[0259] The term “reverse transcriptase” describes a class of polymerases characterized as RNA-dependent DNA polymerases. All known reverse transcriptases require a primer to synthesize a DNA transcript from an RNA template. Historically, reverse transcriptase has been used primarily to transcribe mRNA into cDNA which can then be cloned into a vector for further manipulation. Avian myoblastosis virus (AMV) reverse transcriptase was the first widely used RNA-dependent DNA polymerase (Verma, Biochim. Biophys. Acta 473:1 (1977)). The enzyme has 5′-3′ RNA-directed DNA polymerase activity, 5′-3′ DNA-directed DNA polymerase activity, and RNase H activity. RNase H is a processive 5′ and 3′ ribonuclease specific for the RNA strand for RNA-DNA hybrids (Perbal, A Practical Guide to Molecular Cloning, New York: Wiley & Sons (1984)). Errors in transcription cannot be corrected by reverse transcriptase because known viral reverse transcriptases lack the 3′-5′ exonuclease activity necessary for proofreading (Saunders and Saunders, Microbial Genetics Applied to Biotechnology, London: Croom Helm (1987)). A detailed study of the activity of AMV reverse transcriptase and its associated RNase H activity has been presented by Berger et al., Biochemistry 22:2365-2372 (1983). Another reverse transcriptase which is used extensively in molecular biology is reverse transcriptase originating from Moloney murine leukemia virus (M-MLV). See, e.g., Gerard, G. R., DNA 5:271-279 (1986) and Kotewicz, M. L., et al., Gene 35:249-258 (1985). M-MLV reverse transcriptase substantially lacking in RNase H activity has also been described. See, e.g., U.S. Pat. No. 5,244,797. The invention contemplates the use of any such reverse transcriptases, or variants or mutants thereof.

[0260] In addition, the invention contemplates the use of reverse transcriptases which are error-prone, i.e., which may be referred to as error-prone reverse transcriptases or reverse transcriptases which do not support high fidelity incorporation of nucleotides during polymerization. During synthesis of the single-strand DNA flap based on the RT template integrated with the guide RNA, the error-prone reverse transcriptase can introduce one or more nucleotides which are mismatched with the RT template sequence, thereby introducing changes to the nucleotide sequence through erroneous polymerization of the single-strand DNA flap. These errors introduced during synthesis of the single strand DNA flap then become integrated into the double strand molecule through hybridization to the corresponding endogenous target strand, removal of the endogenous displaced strand, ligation, and then through one more round of endogenous DNA repair and/or sequencing processes.

### Reverse Transcription

[0261] As used herein, the term “reverse transcription” indicates the capability of enzyme to synthesize DNA strand (that is, complementary DNA or cDNA) using RNA as a template. In some embodiments, the reverse transcription can be “error-prone reverse transcription,” which refers to the properties of certain reverse transcriptase enzymes which are error-prone in their DNA polymerization activity.

### PACE

[0262] The term “phage-assisted continuous evolution (PACE),” as used herein, refers to continuous evolution that employs phage as viral vectors. The general concept of PACE technology has been described, for example, in International PCT Application, PCT/US2009/056194, filed Sep. 8, 2009, published as WO 2010/028347 on Mar. 11, 2010; International PCT Application, PCT/US2011/066747, filed Dec. 22, 2011, published as WO 2012/088381 on Jun. 28, 2012; U.S. application, U.S. Pat. No. 9,023,594, issued May 5, 2015, International PCT Application, PCT/US2015/012022, filed Jan. 20, 2015, published as WO 2015/134121 on Sep. 11, 2015, and International PCT Application, PCT/US2016/027795, filed Apr. 15, 2016, published as WO 2016/168631 on Oct. 20, 2016, the entire contents of each of which are incorporated herein by reference.

### Phage

[0263] The term “phage,” as used herein interchangeably with the term “bacteriophage,” refers to a virus that infects bacterial cells. Typically, phages consist of an outer protein capsid enclosing genetic material. The genetic material can be ssRNA, dsRNA, ssDNA, or dsDNA, in either linear or circular form. Phages and phage vectors are well known to those of skill in the art and non-limiting examples of phages that are useful for carrying out the PACE methods provided herein are λ (Lysogen), T2, T4, T7, T12, R17, M13, MS2, G4, P1, P2, P4, Phi X174, N4, Φ6, and Φ29. In certain embodiments, the phage utilized in the present invention is M13. Additional suitable phages and host cells will be apparent to those of skill in the art and the invention is not limited in this aspect. For an exemplary description of additional suitable phages and host cells, see Elizabeth Kutter and Alexander Sulakvelidze: Bacteriophages: Biology and Applications. CRC Press; 1st edition (December 2004), ISBN: 0849313368; Martha R. J. Clokie and Andrew M. Kropinski: Bacteriophages: Methods and Protocols, Volume 1: Isolation, Characterization, and Interactions (Methods in Molecular Biology) Humana Press; 1st edition (December, 2008), ISBN: 1588296822; Martha R. J. Clokie and Andrew M. Kropinski: Bacteriophages: Methods and Protocols, Volume 2: Molecular and Applied Aspects (Methods in Molecular Biology) Humana Press; 1st edition (December 2008), ISBN: 1603275649; all of which are incorporated herein in their entirety by reference for disclosure of suitable phages and host cells as well as methods and protocols for isolation, culture, and manipulation of such phages).

### Protein, Peptide, and Polypeptide

[0264] The terms “protein,” “peptide,” and “polypeptide” are used interchangeably herein, and refer to a polymer of amino acid residues linked together by peptide (amide) bonds. The terms refer to a protein, peptide, or polypeptide of any size, structure, or function. Typically, a protein, peptide, or polypeptide will be at least three amino acids long. A protein, peptide, or polypeptide may refer to an individual protein or a collection of proteins. One or more of the amino acids in a protein, peptide, or polypeptide may be modified, for example, by the addition of a chemical entity such as a carbohydrate group, a hydroxyl group, a phosphate group, a farnesyl group, an isofarnesyl group, a fatty acid group, a linker for conjugation, functionalization, or other modification, etc. A protein, peptide, or polypeptide may also be a single molecule or may be a multi-molecular complex. A protein, peptide, or polypeptide may be just a fragment of a naturally occurring protein or peptide. A protein, peptide, or polypeptide may be naturally occurring, recombinant, or synthetic, or any combination thereof. Any of the proteins provided herein may be produced by any method known in the art. For example, the proteins provided herein may be produced via recombinant protein expression and purification, which is especially suited for fusion proteins comprising a peptide linker. Methods for recombinant protein expression and purification are well known, and include those described by Green and Sambrook, Molecular Cloning: A Laboratory Manual (4th ed., Cold Spring Harbor Laboratory Press, Cold Spring Harbor, N.Y. (2012)), the entire contents of which are incorporated herein by reference.

### Protein Splicing

[0265] The term “protein splicing,” as used herein, refers to a process in which a sequence, an intein (or split inteins, as the case may be), is excised from within an amino acid sequence, and the remaining fragments of the amino acid sequence, the exteins, are ligated via an amide bond to form a continuous amino acid sequence. The term “trans” protein splicing refers to the specific case where the inteins are split inteins and they are located on different proteins.

### Second-Strand Nicking

[0266] The resolution of heteroduplex DNA (i.e., containing one edited and one non-edited strand) formed as a result of prime editing determines long-term editing outcomes. In words, a goal of prime editing is to resolve the heteroduplex DNA (the edited strand paired with the endogenous non-edited strand) formed as an intermediate of PE by permanently integrating the edited strand into the complement, endogenous strand. The approach of “second-strand nicking” can be used herein to help drive the resolution of heteroduplex DNA in favor of permanent integration of the edited strand into the DNA molecule. As used herein, the concept of “second-strand nicking” refers to the introduction of a second nick at a location downstream of the first nick (i.e., the initial nick site that provides the free 3′ end for use in priming of the reverse transcriptase on the extended portion of the guide RNA), preferably on the unedited strand. In certain embodiments, the first nick and the second nick are on opposite strands. In other embodiments, the first nick and the second nick are on opposite strands. In yet another embodiment, the first nick is on the non-target strand (i.e., the strand that forms the single strand portion of the R-loop), and the second nick is on the target strand. In still other embodiments, the first nick is on the edited strand, and the second nick is on the unedited strand. The second nick can be positioned at least 5 nucleotides downstream of the first nick, or at least 6, 7, 8, 9, 10, 11, 12, 13, 14, 15, 16, 17, 18, 19, 20, 21, 22, 23, 24, 25, 26, 27, 28, 29, 30, 40, 50, 60, 70, 80, 90, 100, 110, 120, 130, 140, or 150 or more nucleotides downstream of the first nick. The second nick, in certain embodiments, can be introduced between about 5-150 nucleotides on the unedited strand away from the site of the PEgRNA-induced nick, or between about 5-140, or between about 5-130, or between about 5-120, or between about 5-110, or between about 5-100, or between about 5-90, or between about 5-80, or between about 5-70, or between about 5-60, or between about 5-50, or between about 5-40, or between about 5-30, or between about 5-20, or between about 5-10. In one embodiment, the second nick is introduced between 14-116 nucleotides away from the PEgRNA-induced nick. Without being bound by theory, the second nick induces the cell's endogenous DNA repair and replication processes towards replacement or editing of the unedited strand, thereby permanently installing the edited sequence on both strands and resolving the heteroduplex that is formed as a result of PE. In some embodiments, the edited strand is the non-target strand and the unedited strand is the target strand. In other embodiments, the edited strand is the target strand, and the unedited strand is the non-target strand.

### Sense Strand

[0267] In genetics, a “sense” strand is the segment within double-stranded DNA that runs from 5′ to 3′, and which is complementary to the antisense strand of DNA, or template strand, which runs from 3′ to 5′. In the case of a DNA segment that encodes a protein, the sense strand is the strand of DNA that has the same sequence as the mRNA, which takes the antisense strand as its template during transcription, and eventually undergoes (typically, not always) translation into a protein. The antisense strand is thus responsible for the RNA that is later translated to protein, while the sense strand possesses a nearly identical makeup to that of the mRNA. Note that for each segment of dsDNA, there will possibly be two sets of sense and antisense, depending on which direction one reads (since sense and antisense is relative to perspective). It is ultimately the gene product, or mRNA, that dictates which strand of one segment of dsDNA is referred to as sense or antisense.

[0268] In the context of a PEgRNA, the first step is the synthesis of a single-strand complementary DNA (i.e., the 3′ ssDNA flap, which becomes incorporated) oriented in the 5′ to 3′ direction which is templated off of the PEgRNA extension arm. Whether the 3′ ssDNA flap should be regarded as a sense or antisense strand depends on the direction of transcription since it well accepted that both strands of DNA may serve as a template for transcription (but not at the same time). Thus, in some embodiments, the 3′ ssDNA flap (which overall runs in the 5′ to 3′ direction) will serve as the sense strand because it is the coding strand. In other embodiments, the 3′ ssDNA flap (which overall runs in the 5′ to 3′ direction) will serve as the antisense strand and thus, the template for transcription.

### Spacer Sequence

[0269] As used herein, the term “spacer sequence” in connection with a guide RNA or a PEgRNA refers to the portion of the guide RNA or PEgRNA of about 20 nucleotides which contains a nucleotide sequence that is complementary to the protospacer sequence in the target DNA sequence. The spacer sequence anneals to the protospacer sequence to form a ssRNA/ssDNA hybrid structure at the target site and a corresponding R loop ssDNA structure of the endogenous DNA strand that is complementary to the protospacer sequence.

### Subject

[0270] The term “subject,” as used herein, refers to an individual organism, for example, an individual mammal. In some embodiments, the subject is a human. In some embodiments, the subject is a non-human mammal. In some embodiments, the subject is a non-human primate. In some embodiments, the subject is a rodent. In some embodiments, the subject is a sheep, a goat, a cattle, a cat, or a dog. In some embodiments, the subject is a vertebrate, an amphibian, a reptile, a fish, an insect, a fly, or a nematode. In some embodiments, the subject is a research animal. In some embodiments, the subject is genetically engineered, e.g., a genetically engineered non-human subject. The subject may be of either sex and at any stage of development.

### Split Intein

[0271] Although inteins are most frequently found as a contiguous domain, some exist in a naturally split form. In this case, the two fragments are expressed as separate polypeptides and must associate before splicing takes place, so-called protein trans-splicing.

[0272] An exemplary split intein is the Ssp DnaE intein, which comprises two subunits, namely, DnaE-N and DnaE-C. The two different subunits are encoded by separate genes, namely dnaE-n and dnaE-c, which encode the DnaE-N and DnaE-C subunits, respectively. DnaE is a naturally occurring split intein in Synechocytis sp. PCC6803 and is capable of directing trans-splicing of two separate proteins, each comprising a fusion with either DnaE-N or DnaE-C.

[0273] Additional naturally occurring or engineered split-intein sequences are known in the or can be made from whole-intein sequences described herein or those available in the art. Examples of split-intein sequences can be found in Stevens et al., “A promiscuous split intein with expanded protein engineering applications,” PNAS, 2017, Vol. 114: 8538-8543; Iwai et al., “Highly efficient protein trans-splicing by a naturally split DnaE intein from Nostc punctiforme, FEBS Lett, 580: 1853-1858, each of which are incorporated herein by reference. Additional split intein sequences can be found, for example, in WO 2013/045632, WO 2014/055782, WO 2016/069774, and EP2877490, the contents each of which are incorporated herein by reference.

[0274] In addition, protein splicing in trans has been described in vivo and in vitro (Shingledecker, et al., Gene 207:187 (1998), Southworth, et al., EMBO J. 17:918 (1998); Mills, et al., Proc. Natd. Acad. Sci. USA, 95:3543-3548 (1998); Lew, et al., J. Biol. Chem., 273:15887-15890 (1998); Wu, et al., Biochim. Biophys. Acta 35732:1 (1998b), Yamazaki, et al., J. Am. Chem. Soc. 120:5591 (1998), Evans, et al., J. Biol. Chem. 275:9091 (2000); Otomo, et al., Biochemistry 38:16040-16044 (1999); Otomo, et al., J. Biolmol. NMR 14:105-114 (1999); Scott, et al., Proc. Natd. Acad. Sci. USA 96:13638-13643 (1999)) and provides the opportunity to express a protein as to two inactive fragments that subsequently undergo ligation to form a functional product, e.g., as shown in FIGS. 66 and 67 with regard to the formation of a complete PE fusion protein from two separately-expressed halves.

### Target Site

[0275] The term “target site” refers to a sequence within a nucleic acid molecule that is edited by a prime editor (PE) disclosed herein. The target site further refers to the sequence within a nucleic acid molecule to which a complex of the prime editor (PE) and gRNA binds.

tPERT

[0276] See definition for “trans prime editor RNA template (tPERT).”

### Temporal Second-Strand Nicking

[0277] As used herein, the term “temporal second-strand nicking” refers to a variant of second strand nicking whereby the installation of the second nick in the unedited strand occurs only after the desired edit is installed in the edited strand. This avoids concurrent nicks on both strands that could lead to double-stranded DNA breaks. The second-strand nicking guide RNA is designed for temporal control such that the second strand nick is not introduced until after the installation of the desired edit. This is achieved by designing a gRNA with a spacer sequence that matches only the edited strand, but not the original allele. Using this strategy, mismatches between the protospacer and the unedited allele should disfavor nicking by the sgRNA until after the editing event on the PAM strand takes place.

### Trans Prime Editing

[0278] As used herein, the term “trans prime editing” refers to a modified form of prime editing that utilizes a split PEgRNA, i.e., wherein the PEgRNA is separated into two separate molecules: an sgRNA and a trans prime editing RNA template (tPERT). The sgRNA serves to target the prime editor (or more generally, to target the napDNAbp component of the prime editor) to the desired genomic target site, while the tPERT is used by the polymerase (e.g., a reverse transcriptase) to write new DNA sequence into the target locus once the tPERT is recruited in trans to the prime editor by the interaction of binding domains located on the prime editor and on the tPERT. In one embodiment, the binding domains can include RNA-protein recruitment moieties, such as a MS2 aptamer located on the tPERT and an MS2cp protein fused to the prime editor. An advantage of trans prime editing is that by separating the DNA synthesis template from the guide RNA, one can potentially use longer length templates.

[0279] An embodiment of trans prime editing is shown in FIGS. 3G and 3H. FIG. 3G shows the composition of the trans prime editor complex on the left (“RP-PE:gRNA complex), which comprises an napDNAbp fused to each of a polymerase (e.g., a reverse transcriptase) and a rPERT recruiting protein (e.g., MS2sc), and which is complexed with a guide RNA. FIG. 3G further shows a separate tPERT molecule, which comprises the extension arm features of a PEgRNA, including the DNA synthesis template and the primer binding sequence. The tPERT molecule also includes an RNA-protein recruitment domain (which, in this case, is a stem loop structure and can be, for example, MS2 aptamer). As depicted in the process described in FIG. 3H, the RP-PE:gRNA complex binds to and nicks the target DNA sequence. Then, the recruiting protein (RP) recruits a tPERT to co-localize to the prime editor complex bound to the DNA target site, thereby allowing the primer binding site to bind to the primer sequence on the nicked strand, and subsequently, allowing the polymerase (e.g., RT) to synthesize a single strand of DNA against the DNA synthesis template up through the 5′ of the tPERT.

[0280] While the tPERT is shown in FIG. 3G and FIG. 3H as comprising the PBS and DNA synthesis template on the 5′ end of the RNA-protein recruitment domain, the tPERT in other configurations may be designed with the PBS and DNA synthesis template located on the 3′ end of the RNA-protein recruitment domain. However, the tPERT with the 5′ extension has the advantage that synthesis of the single strand of DNA will naturally terminate at the 5′ end of the tPERT and thus, does not risk using any portion of the RNA-protein recruitment domain as a template during the DNA synthesis stage of prime editing.

Trans Prime Editor RNA Template (tPERT)

[0281] As used herein, a “trans prime editor RNA template (tPERT)” refers to a component used in trans prime editing, a modified version of prime editing which operates by separating the PEgRNA into two distinct molecules: a guide RNA and a tPERT molecule. The tPERT molecule is programmed to co-localize with the prime editor complex at a target DNA site, bringing the primer binding site and the DNA synthesis template to the prime editor in trans. For example, see FIG. 3G for an embodiment of a trans prime editor (tPE) which shows a two-component system comprising (1) an RP-PE:gRNA complex and (2) a tPERT that includes the primer binding site and the DNA synthesis template joined to an RNA-protein recruitment domain, wherein the RP (recruiting protein) component of the RP-PE:gRNA complex recruits the tPERT to a target site to be edited, thereby associating the PBS and DNA synthesis template with the prime editor in trans. Said another way, the tPERT is engineered to contain (all or part of) the extension arm of a PEgRNA, which includes the primer binding site and the DNA synthesis template.

### Transitions

[0282] As used herein, “transitions” refer to the interchange of purine nucleobases (A↔G) or the interchange of pyrimidine nucleobases (C↔T). This class of interchanges involves nucleobases of similar shape. The compositions and methods disclosed herein are capable of inducing one or more transitions in a target DNA molecule. The compositions and methods disclosed herein are also capable of inducing both transitions and transversion in the same target DNA molecule. These changes involve A↔G, G↔A, C↔T, or T↔C. In the context of a double-strand DNA with Watson-Crick paired nucleobases, transversions refer to the following base pair exchanges: A:T↔G:C, G:G↔A:T, C:G↔T:A, or T:A↔C:G. The compositions and methods disclosed herein are capable of inducing one or more transitions in a target DNA molecule. The compositions and methods disclosed herein are also capable of inducing both transitions and transversion in the same target DNA molecule, as well as other nucleotide changes, including deletions and insertions.

### Transversions

[0283] As used herein, “transversions” refer to the interchange of purine nucleobases for pyrimidine nucleobases, or in the reverse and thus, involve the interchange of nucleobases with dissimilar shape. These changes involve T↔A, T↔G, C↔G, C↔A, A↔T, A↔C, G↔C, and G↔T. In the context of a double-strand DNA with Watson-Crick paired nucleobases, transversions refer to the following base pair exchanges: T:A↔A:T, T:A↔G:C, C:G↔G:C, C:G↔A:T, A:T↔T:A, A:T↔C:G, G:C↔C:G, and G:C↔T:A. The compositions and methods disclosed herein are capable of inducing one or more transversions in a target DNA molecule. The compositions and methods disclosed herein are also capable of inducing both transitions and transversion in the same target DNA molecule, as well as other nucleotide changes, including deletions and insertions.

### Treatment

[0284] The terms “treatment,” “treat,” and “treating,” refer to a clinical intervention aimed to reverse, alleviate, delay the onset of, or inhibit the progress of a disease or disorder, or one or more symptoms thereof, as described herein. As used herein, the terms “treatment,” “treat,” and “treating” refer to a clinical intervention aimed to reverse, alleviate, delay the onset of, or inhibit the progress of a disease or disorder, or one or more symptoms thereof, as described herein. In some embodiments, treatment may be administered after one or more symptoms have developed and/or after a disease has been diagnosed. In other embodiments, treatment may be administered in the absence of symptoms, e.g., to prevent or delay onset of a symptom or inhibit onset or progression of a disease. For example, treatment may be administered to a susceptible individual prior to the onset of symptoms (e.g., in light of a history of symptoms and/or in light of genetic or other susceptibility factors). Treatment may also be continued after symptoms have resolved, for example, to prevent or delay their recurrence.

### Trinucleotide Repeat Disorder

[0285] As used herein, a “trinucleotide repeat disorder” (or alternatively, “expansion repeat disorder” or “repeat expansion disorder”) refers to a set of genetic disorders which are cause by “trinucleotide repeat expansion,” which is a kind of mutation where a certain trinucleotide repeats in certain genes or introns. Trinucleotide repeats were once thought to be commonplace iterations in the genome, but the 1990s clarified these disorders. These apparently ‘benign’ stretches of DNA can sometimes expand and cause disease. Several defining features are shared amongst disorders caused by trinucleotide repeat expansions. First, the mutant repeats show both somatic and germline instability and, more frequently, they expand rather than contract in successive transmissions. Secondly, an earlier age of onset and increasing severity of phenotype in subsequent generations (anticipation) generally are correlated with larger repeat length. Finally, the parental origin of the disease allele can often influence anticipation, with paternal transmissions carrying a greater risk of expansion for many of these disorders.

[0286] Triplet expansion is thought to be caused by slippage during DNA replication. Due to the repetitive nature of the DNA sequence in these regions ‘loop out’ structures may form during DNA replication while maintaining complementary base pairing between the parent strand and daughter strand being synthesized. If the loop out structure is formed from sequence on the daughter strand this will result in an increase in the number of repeats. However, if the loop out structure is formed on the parent strand a decrease in the number of repeats occurs. It appears that expansion of these repeats is more common than reduction. Generally the larger the expansion the more likely they are to cause disease or increase the severity of disease. This property results in the characteristic of anticipation seen in trinucleotide repeat disorders. Anticipation describes the tendency of age of onset to decrease and severity of symptoms to increase through successive generations of an affected family due to the expansion of these repeats.

[0287] Nucleotide repeat disorders may include those in which the triplet repeat occurs in a non-coding region (i.e., a non-coding trinucleotide repeat disorder) or in a coding region

[0288] The prime editor (PE) system described herein may use to treat nucleotide repeat disorders, which may include fragile X syndrome (FRAXA), fragile XE MR (FRAXE), Freidreich ataxia (FRDA), myotonic dystrophy (DM), spinocerebellar ataxia type 8 (SCA8), and spinocerebellar ataxia type 12 (SCA12), among others.

### Upstream

[0289] As used herein, the terms “upstream” and “downstream” are terms of relativity that define the linear position of at least two elements located in a nucleic acid molecule (whether single or double-stranded) that is orientated in a 5′-to-3′ direction. In particular, a first element is upstream of a second element in a nucleic acid molecule where the first element is positioned somewhere that is 5′ to the second element. For example, a SNP is upstream of a Cas9-induced nick site if the SNP is on the 5′ side of the nick site. Conversely, a first element is downstream of a second element in a nucleic acid molecule where the first element is positioned somewhere that is 3′ to the second element. For example, a SNP is downstream of a Cas9-induced nick site if the SNP is on the 3′ side of the nick site. The nucleic acid molecule can be a DNA (double or single stranded). RNA (double or single stranded), or a hybrid of DNA and RNA. The analysis is the same for single strand nucleic acid molecule and a double strand molecule since the terms upstream and downstream are in reference to only a single strand of a nucleic acid molecule, except that one needs to select which strand of the double stranded molecule is being considered. Often, the strand of a double stranded DNA which can be used to determine the positional relativity of at least two elements is the “sense” or “coding” strand. In genetics, a “sense” strand is the segment within double-stranded DNA that runs from 5′ to 3′, and which is complementary to the antisense strand of DNA, or template strand, which runs from 3′ to 5′. Thus, as an example, a SNP nucleobase is “downstream” of a promoter sequence in a genomic DNA (which is double-stranded) if the SNP nucleobase is on the 3′ side of the promoter on the sense or coding strand.

### Variant

[0290] As used herein the term “variant” should be taken to mean the exhibition of qualities that have a pattern that deviates from what occurs in nature, e.g., a variant Cas9 is a Cas9 comprising one or more changes in amino acid residues as compared to a wild type Cas9 amino acid sequence. The term “variant” encompasses homologous proteins having at least 75%, or at least 80%, or at least 85%, or at least 90%, or at least 95%, or at least 99% percent identity with a reference sequence and having the same or substantially the same functional activity or activities as the reference sequence. The term also encompasses mutants, truncations, or domains of a reference sequence, and which display the same or substantially the same functional activity or activities as the reference sequence.

### Vector

[0291] The term “vector,” as used herein, refers to a nucleic acid that can be modified to encode a gene of interest and that is able to enter into a host cell, mutate and replicate within the host cell, and then transfer a replicated form of the vector into another host cell. Exemplary suitable vectors include viral vectors, such as retroviral vectors or bacteriophages and filamentous phage, and conjugative plasmids. Additional suitable vectors will be apparent to those of skill in the art based on the instant disclosure.

### Wild Type

[0292] As used herein the term “wild type” is a term of the art understood by skilled persons and means the typical form of an organism, strain, gene or characteristic as it occurs in nature as distinguished from mutant or variant forms.

### 5′ Endogenous DNA Flap

[0293] As used herein, the term “5′ endogenous DNA flap” refers to the strand of DNA situated immediately downstream of the PE-induced nick site in the target DNA. The nicking of the target DNA strand by PE exposes a 3′ hydroxyl group on the upstream side of the nick site and a 5′ hydroxyl group on the downstream side of the nick site. The endogenous strand ending in the 3′ hydroxyl group is used to prime the DNA polymerase of the prime editor (e.g., wherein the DNA polymerase is a reverse transcriptase). The endogenous strand on the downstream side of the nick site and which begins with the exposed 5′ hydroxyl group is referred to as the “5′ endogenous DNA flap” and is ultimately removed and replaced by the newly synthesized replacement strand (i.e., “3′ replacement DNA flap”) the encoded by the extension of the PEgRNA.

### 5′ Endogenous DNA Flap Removal

[0294] As used herein, the term “5′ endogenous DNA flap removal” or “5′ flap removal” refers to the removal of the 5′ endogenous DNA flap that forms when the RT-synthesized single-strand DNA flap competitively invades and hybridizes to the endogenous DNA, displacing the endogenous strand in the process. Removing this endogenous displaced strand can drive the reaction towards the formation of the desired product comprising the desired nucleotide change. The cell's own DNA repair enzymes may catalyze the removal or excision of the 5′ endogenous flap (e.g., a flap endonuclease, such as EXO1 or FEN1). Also, host cells may be transformed to express one or more enzymes that catalyze the removal of said 5′ endogenous flaps, thereby driving the process toward product formation (e.g., a flap endonuclease). Flap endonucleases are known in the art and can be found described in Patel et al., “Flap endonucleases pass 5′-flaps through a flexible arch using a disorder-thread-order mechanism to confer specificity for free 5′-ends,” Nucleic Acids Research, 2012, 40(10): 4507-4519 and Tsutakawa et al., “Human flap endonuclease structures, DNA double-base flipping, and a unified understanding of the FEN1 superfamily,” Cell, 2011, 145(2): 198-211 (each of which are incorporated herein by reference).

### 3′ Replacement DNA Flap

[0295] As used herein, the term “3′ replacement DNA flap” or simply, “replacement DNA flap,” refers to the strand of DNA that is synthesized by the prime editor and which is encoded by the extension arm of the prime editor PEgRNA. More in particular, the 3′ replacement DNA flap is encoded by the polymerase template of the PEgRNA. The 3′ replacement DNA flap comprises the same sequence as the 5′ endogenous DNA flap except that it also contains the edited sequence (e.g., single nucleotide change). The 3′ replacement DNA flap anneals to the target DNA, displacing or replacing the 5′ endogenous DNA flap (which can be excised, for example, by a 5′ flap endonuclease, such as FEN1 or EXO1) and then is ligated to join the 3′ end of the 3′ replacement DNA flap to the exposed 5′ hydroxyl end of endogenous DNA (exposed after excision of the 5′ endogenous DNA flap, thereby reforming a phosphodiester bond and installing the 3′ replacement DNA flap to form a heteroduplex DNA containing one edited strand and one unedited strand. DNA repair processes resolve the heteroduplex by copying the information in the edited strand to the complementary strand permanently installs the edit in to the DNA. This resolution process can be driven further to completion by nicking the unedited strand, i.e., by way of “second-strand nicking,” as described herein.

### DETAILED DESCRIPTION OF CERTAIN EMBODIMENTS

[0296] Adoption of the clustered regularly interspaced short palindromic repeat (CRISPR) system for genome editing has revolutionized the life sciences¹⁻³. Although gene disruption using CRISPR is now routine, the precise installation of single nucleotide edits remains a major challenge, despite being necessary for studying or correcting a large number of disease-causative mutations. Homology directed repair (HDR) is capable of achieving such edits, but suffers from low efficiency (often <5%), a requirement for donor DNA repair templates, and deleterious effects of double-stranded DNA break (DSB) formation. Recently, Prof. David Liu et al.'s laboratory developed base editing, which achieves efficient single nucleotide editing without DSBs. Base editors (BEs) combine the CRISPR system with base-modifying deaminase enzymes to convert target C⋅G or A⋅T base pairs to A⋅T or G⋅C, respectively⁴⁻⁶. Although already widely used by researchers worldwide, current BEs enable only four of the twelve possible base pair conversions and are unable to correct small insertions or deletions. Moreover, the targeting scope of base editing is limited by the editing of non-target C or A bases adjacent to the target base (“bystander editing”) and by the requirement that a PAM sequence exist 15±2 bp from the target base. Overcoming these limitations would therefore greatly broaden the basic research and therapeutic applications of genome editing.

[0297] The present disclosure proposes a new precision editing approach that offers many of the benefits of base editing-namely, avoidance of double strand breaks and donor DNA repair templates—while overcoming its major limitations. The proposed approach described herein achieves the direct installation of edited DNA strands at target genomic sites using target-primed reverse transcription (TPRT). In the design discussed herein, CRISPR guide RNA (gRNA) will be engineered to carry a reverse transcriptase (RT) template sequence encoding a single-stranded DNA comprising a desired nucleotide change. The CRISPR nuclease (Cas9)-nicked target site DNA will serve as the primer for reverse transcription of the template sequence on the modified gRNA, allowing for direct incorporation of any desired nucleotide edit.

[0298] Accordingly, the present invention relates in part to the discovery that the mechanism of target-primed reverse transcription (TPRT) can be leveraged or adapted for conducting precision CRISPR/Cas-based genome editing with high efficiency and genetic flexibility (e.g., as depicted in various embodiments of FIGS. 1A-1F). The inventors have proposed herein to use Cas protein-reverse transcriptase fusions to target a specific DNA sequence with a modified guide RNA (“an extended guide RNA”), generate a single strand nick at the target site, and use the nicked DNA as a primer for reverse transcription of an engineered reverse transcriptase template that is integrated into the extended guide RNA. The newly synthesized strand would be homologous to the genomic target sequence except for the inclusion of a desired nucleotide change (e.g., a single nucleotide change, a deletion, or an insertion, or a combination thereof). The newly synthesize strand of DNA may be referred to as a single strand DNA flap, which would compete for hybridization with the complementary homologous endogenous DNA strand, thereby displacing the corresponding endogenous strand. Resolution of this hybridized intermediate can include removal of the resulting displaced flap of endogenous DNA (e.g., with a 5′ end DNA flap endonuclease, FEN1), ligation of the synthesized single strand DNA flap to the target DNA, and assimilation of the desired nucleotide change as a result of cellular DNA repair and/or replication processes. Because templated DNA synthesis offers single nucleotide precision, the scope of this approach is very broad and could foreseeably be used for myriad applications in basic science and therapeutics.

[1] napDNAbp

[0299] The prime editors and trans prime editors described herein may comprise a nucleic acid programmable DNA binding protein (napDNAbp).

[0300] In one aspect, a napDNAbp can be associated with or complexed with at least one guide nucleic acid (e.g., guide RNA or a PEgRNA), which localizes the napDNAbp to a DNA sequence that comprises a DNA strand (i.e., a target strand) that is complementary to the guide nucleic acid, or a portion thereof (e.g., the spacer of a guide RNA which anneals to the protospacer of the DNA target). In other words, the guide nucleic-acid “programs” the napDNAbp (e.g., Cas9 or equivalent) to localize and bind to complementary sequence of the protospacer in the DNA.

[0301] Any suitable napDNAbp may be used in the prime editors described herein. In various embodiments, the napDNAbp may be any Class 2 CRISPR-Cas system, including any type II, type V, or type VI CRISPR-Cas enzyme. Given the rapid development of CRISPR-Cas as a tool for genome editing, there have been constant developments in the nomenclature used to describe and/or identify CRISPR-Cas enzymes, such as Cas9 and Cas9 orthologs. This application references CRISPR-Cas enzymes with nomenclature that may be old and/or new. The skilled person will be able to identify the specific CRISPR-Cas enzyme being referenced in this application based on the nomenclature that is used, whether it is old (i.e., “legacy”) or new nomenclature. CRISPR-Cas nomenclature is extensively discussed in Makarova et al., “Classification and Nomenclature of CRISPR-Cas Systems: Where from Here?,” The CRISPR Journal, Vol. 1. No. 5, 2018, the entire contents of which are incorporated herein by reference. The particular CRISPR-Cas nomenclature used in any given instance in this application is not limiting in any way and the skilled person will be able to identify which CRISPR-Cas enzyme is being referenced.

[0302] For example, the following type II, type V, and type VI Class 2 CRISPR-Cas enzymes have the following art-recognized old (i.e., legacy) and new names. Each of these enzymes, and/or variants thereof, may be used with the prime editors described herein:

| | |
|---|---|
| Legacy nomenclature | Current nomenclature* |

type II CRISPR-Cas enzymes

| | |
|---|---|
| Cas9 | same |

type V CRISPR-Cas enzymes

| | |
|---|---|
| Cpf1 | Cas12a |
| CasX | Cas12e |
| C2c1 | Cas12b1 |
| Cas12b2 | same |
| C2c3 | Cas12c |
| CasY | Cas12d |
| C2c4 | same |
| C2c8 | same |
| C2c5 | same |
| C2c10 | same |
| C2c9 | same |

type VI CRISPR-Cas enzymes

| | |
|---|---|
| C2c2 | Cas13a |
| Cas13d | same |
| C2c7 | Cas13c |
| C2c6 | Cas13b |

*See Makarova et al., The CRISPR Journal, Vol. 1, No. 5, 2018

[0303] Without being bound by theory, the mechanism of action of certain napDNAbp contemplated herein includes the step of forming an R-loop whereby the napDNAbp induces the unwinding of a double-strand DNA target, thereby separating the strands in the region bound by the napDNAbp. The guide RNA spacer then hybridizes to the “target strand” at the protospacer sequence. This displaces a “non-target strand” that is complementary to the target strand, which forms the single strand region of the R-loop. In some embodiments, the napDNAbp includes one or more nuclease activities, which then cut the DNA leaving various types of lesions. For example, the napDNAbp may comprises a nuclease activity that cuts the non-target strand at a first location, and/or cuts the target strand at a second location. Depending on the nuclease activity, the target DNA can be cut to form a “double-stranded break” whereby both strands are cut. In other embodiments, the target DNA can be cut at only a single site, i.e., the DNA is “nicked” on one strand. Exemplary napDNAbp with different nuclease activities include “Cas9 nickase” (“nCas9”) and a deactivated Cas9 having no nuclease activities (“dead Cas9” or “dCas9”).

[0304] The below description of various napDNAbps which can be used in connection with the presently disclose prime editors is not meant to be limiting in any way. The prime editors may comprise the canonical SpCas9, or any ortholog Cas9 protein, or any variant Cas9 protein—including any naturally occurring variant, mutant, or otherwise engineered version of Cas9—that is known or which can be made or evolved through a directed evolutionary or otherwise mutagenic process. In various embodiments, the Cas9 or Cas9 variants have a nickase activity, i.e., only cleave of strand of the target DNA sequence. In other embodiments, the Cas9 or Cas9 variants have inactive nucleases, i.e., are “dead” Cas9 proteins. Other variant Cas9 proteins that may be used are those having a smaller molecular weight than the canonical SpCas9 (e.g., for easier delivery) or having modified or rearranged primary amino acid structure (e.g., the circular permutant formats).

[0305] The prime editors described herein may also comprise Cas9 equivalents, including Cas12a (Cpf1) and Cas12b1 proteins which are the result of convergent evolution. The napDNAbps used herein (e.g., SpCas9, Cas9 variant, or Cas9 equivalents) may also may also contain various modifications that alter/enhance their PAM specifities. Lastly, the application contemplates any Cas9, Cas9 variant, or Cas9 equivalent which has at least 70%, at least 75%, at least 80%, at least 85%, at least 90%, at least 91%, at least 92%, at least 93%, at least 94%, at least 95%, at least 96%, at least 97%, at least 98%, at least 99%, or at least 99.9% sequence identity to a reference Cas9 sequence, such as a references SpCas9 canonical sequence or a reference Cas9 equivalent (e.g., Cas12a (Cpf1)).

[0306] The napDNAbp can be a CRISPR (clustered regularly interspaced short palindromic repeat)-associated nuclease. As outlined above, CRISPR is an adaptive immune system that provides protection against mobile genetic elements (viruses, transposable elements and conjugative plasmids). CRISPR clusters contain spacers, sequences complementary to antecedent mobile elements, and target invading nucleic acids. CRISPR clusters are transcribed and processed into CRISPR RNA (crRNA). In type II CRISPR systems correct processing of pre-crRNA requires a trans-encoded small RNA (tracrRNA), endogenous ribonuclease 3 (mc) and a Cas9 protein. The tracrRNA serves as a guide for ribonuclease 3-aided processing of pre-crRNA. Subsequently, Cas9/crRNA/tracrRNA endonucleolytically cleaves linear or circular dsDNA target complementary to the spacer. The target strand not complementary to crRNA is first cut endonucleolytically, then trimmed 3′-5′ exonucleolytically. In nature, DNA-binding and cleavage typically requires protein and both RNAs. However, single guide RNAs (“sgRNA”, or simply “gRNA”) can be engineered so as to incorporate aspects of both the crRNA and tracrRNA into a single RNA species. See, e.g., Jinek M. et al., Science 337:816-821(2012), the entire contents of which is hereby incorporated by reference.

[0307] In some embodiments, the napDNAbp directs cleavage of one or both strands at the location of a target sequence, such as within the target sequence and/or within the complement of the target sequence. In some embodiments, the napDNAbp directs cleavage of one or both strands within about 1, 2, 3, 4, 5, 6, 7, 8, 9, 10, 15, 20, 25, 50, 100, 200, 500, or more base pairs from the first or last nucleotide of a target sequence. In some embodiments, a vector encodes a napDNAbp that is mutated to with respect to a corresponding wild-type enzyme such that the mutated napDNAbp lacks the ability to cleave one or both strands of a target polynucleotide containing a target sequence. For example, an aspartate-to-alanine substitution (D10A) in the RuvC I catalytic domain of Cas9 from S. pyogenes converts Cas9 from a nuclease that cleaves both strands to a nickase (cleaves a single strand). Other examples of mutations that render Cas9 a nickase include, without limitation, H840A, N854A, and N863A in reference to the canonical SpCas9 sequence, or to equivalent amino acid positions in other Cas9 variants or Cas9 equivalents.

[0308] As used herein, the term “Cas protein” refers to a full-length Cas protein obtained from nature, a recombinant Cas protein having a sequences that differs from a naturally occurring Cas protein, or any fragment of a Cas protein that nevertheless retains all or a significant amount of the requisite basic functions needed for the disclosed methods, i.e., (i) possession of nucleic-acid programmable binding of the Cas protein to a target DNA, and (ii) ability to nick the target DNA sequence on one strand. The Cas proteins contemplated herein embrace CRISPR Cas 9 proteins, as well as Cas9 equivalents, variants (e.g., Cas9 nickase (nCas9) or nuclease inactive Cas9 (dCas9)) homologs, orthologs, or paralogs, whether naturally occurring or non-naturally occurring (e.g., engineered or recombinant), and may include a Cas9 equivalent from anyClass 2 CRISPR system (e.g., type II, V, VI), including Cas12a (Cpf1), Cas12e (CasX), Cas12b1 (C2c1), Cas12b2, Cas12c (C2c3), C2c4, C2c8, C2c5, C2c10, C2c9 Cas13a (C2c2), Cas13d, Cas13c (C2c7), Cas13b (C2c6), and Cas13b. Further Cas-equivalents are described in Makarova et al., “C2c2 is a single-component programmable RNA-guided RNA-targeting CRISPR effector,” Science 2016; 353(6299) and Makarova et al., “Classification and Nomenclature of CRISPR-Cas Systems: Where from Here?,” The CRISPR Journal, Vol. 1. No. 5, 2018, the contents of which are incorporated herein by reference.

[0309] The terms “Cas9” or “Cas9 nuclease” or “Cas9 moiety” or “Cas9 domain” embrace any naturally occurring Cas9 from any organism, any naturally-occurring Cas9 equivalent or functional fragment thereof, any Cas9 homolog, ortholog, or paralog from any organism, and any mutant or variant of a Cas9, naturally-occurring or engineered. The term Cas9 is not meant to be particularly limiting and may be referred to as a “Cas9 or equivalent.” Exemplary Cas9 proteins are further described herein and/or are described in the art and are incorporated herein by reference. The present disclosure is unlimited with regard to the particular Cas9 that is employed in the prime editor (PE) of the invention.

[0310] As noted herein, Cas9 nuclease sequences and structures are well known to those of skill in the art (see, e.g., “Complete genome sequence of an M1 strain of Streptococcus pyogenes.” Ferretti et al., J. J., McShan W. M., Ajdic D. J., Savic D. J., Savic G., Lyon K., Primeaux C., Sezate S., Suvorov A. N., Kenton S., Lai H. S., Lin S. P., Qian Y., Jia H. G., Najar F. Z., Ren Q., Zhu H., Song L., White J., Yuan X., Clifton S. W., Roe B. A., McLaughlin R. E., Proc. Natd. Acad. Sci. U.S.A. 98:4658-4663(2001); “CRISPR RNA maturation by trans-encoded small RNA and host factor RNase III.” Deltcheva E., Chylinski K., Sharma C. M., Gonzales K., Chao Y., Pirzada Z. A., Eckert M. R., Vogel J., Charpentier E., Nature 471:602-607(2011); and “A programmable dual-RNA-guided DNA endonuclease in adaptive bacterial immunity.” Jinek M., Chylinski K., Fonfara I., Hauer M., Doudna J. A., Charpentier E. Science 337:816-821(2012), the entire contents of each of which are incorporated herein by reference).

[0311] Examples of Cas9 and Cas9 equivalents are provided as follows; however, these specific examples are not meant to be limiting. The primer editor of the present disclosure may use any suitable napDNAbp, including any suitable Cas9 or Cas9 equivalent.

[0312] A. Wild Type Canonical SpCas9

[0313] In one embodiment, the primer editor constructs described herein may comprise the “canonical SpCas9” nuclease from S. pyogenes, which has been widely used as a tool for genome engineering and is categorized as the type II subgroup of enzymes of the Class 2 CRISPR-Cas systems. This Cas9 protein is a large, multi-domain protein containing two distinct nuclease domains. Point mutations can be introduced into Cas9 to abolish one or both nuclease activities, resulting in a nickase Cas9 (nCas9) or dead Cas9 (dCas9), respectively, that still retains its ability to bind DNA in a sgRNA-programmed manner. In principle, when fused to another protein or domain, Cas9 or variant thereof (e.g., nCas9) can target that protein to virtually any DNA sequence simply by co-expression with an appropriate sgRNA. As used herein, the canonical SpCas9 protein refers to the wild type protein from Streptococcus pyogenes having the following amino acid sequence:

| Description | Sequence | SEQ ID NO: |
|---|---|---|
| SpCas9 | MDKKYSIGLDIGTNSVGWAVITDEYKVPSKKFKVLGN | SEQ ID NO: 18 |
| Strepto- | TDRHSIKKNLIGALLFDSGETAEATRLKRTARRRYTRR | |
| coccus | KNRICYLQEIFSNEMAKVDDSFFHRLEESFLVEEDKKH | |
| pyogenes | ERHPIFGNIVDEVAYHEKYPTIYHLRKKLVDSTDKADL | |
| M1 | RLIYLALAHMIKFRGHFLIEGDLNPDNSDVDKLFIQLVQ | |
| SwissProt | TYNQLFEENPINASGVDAKAILSARLSKSRRLENLIAQL | |
| Accession | PGEKKNGLFGNLIALSLGLTPNFKSNFDLAEDAKLQLS | |
| No. Q99ZW2 | KDTYDDDLDNLLAQIGDQYADLFLAAKNLSDAILLSDI | |
| Wild type | LRVNTEITKAPLSASMIKRYDEHHQDLTLLKALVRQQL | |
| | PEKYKEIFFDQSKNGYAGYIDGGASQEEFYKFIKPILEK | |
| | MDGTEELLVKLNREDLLRKQRTFDNGSIPHQIHLGELH | |
| | AILRRQEDFYPFLKDNREKIEKILTFRIPYYVGPLARGN | |
| | SRFAWMTRKSEETITPWNFEEVVDKGASAQSFIERMTN | |
| | FDKNLPNEKVLPKHSLLYEYFTVYNELTKVKYVTEGM | |
| | RKPAFLSGEQKKAIVDLLFKTNRKVTVKQLKEDYFKKI | |
| | ECFDSVEISGVEDRFNASLGTYHDLLKIIKDKDFLDNEE | |
| | NEDILEDIVLTLTLFEDREMIEERLKTYAHLFDDKVMK | |
| | QLKRRRYTGWGRLSRKLINGIRDKQSGKTILDFLKSDG | |
| | FANRNFMQLIHDDSLTFKEDIQKAQVSGQGDSLHEHIA | |
| | NLAGSPAIKKGILQTVKVVDELVKVMGRHKPENIVIEM | |
| | ARENQTTQKGQKNSRERMKRIEEGIKELGSQILKEHPV | |
| | ENTQLQNEKLYLYYLQNGRDMYVDQELDINRLSDYD | |
| | VDHIVPQSFLKDDSIDNKVLTRSDKNRGKSDNVPSEEV | |
| | VKKMKNYWRQLLNAKLITQRKFDNLTKAERGGLSEL | |
| | DKAGFIKRQLVETRQITKHVAQILDSRMNTKYDENDK | |
| | LIREVKVITLKSKLVSDFRKDFQFYKVREINNYHHAHD | |
| | AYLNAVVGTALIKKYPKLESEFVYGDYKVYDVRKMIA | |
| | KSEQEIGKATAKYFFYSNIMNFFKTEITLANGEIRKRPL | |
| | IETNGETGEIVWDKGRDFATVRKVLSMPQVNIVKKTEV | |
| | QTGGFSKESILPKRNSDKLIARKKDWDPKKYGGFDSPT | |
| | VAYSVLVVAKVEKGKSKKLKSVKELLGITIMERSSFEK | |
| | NPIDFLEAKGYKEVKKDLIIKLPKYSLFELENGRKRML | |
| | ASAGELQKGNELALPSKYVNFLYLASHYEKLKGSPED | |
| | NEQKQLFVEQHKHYLDEIIEQISEFSKRVILADANLDKV | |
| | LSAYNKHRDKPIREQAENIIHLFTLTNLGAPAAFKYFDT | |
| | TIDRKRYTSTKEVLDATLIHQSITGLYETRIDLSQLGGD | |
| SpCas9 | ATGGATAAAAAATATAGCATTGGCCTGGATATTGGC | SEQ ID NO: 19 |
| Reverse | ACCAACAGCGTGGGCTGGGCGGTGATTACCGATGAA | |
| translation | TATAAAGTGCCGAGCAAAAAATTTAAAGTGCTGGGC | |
| of | AACACCGATCGCCATAGCATTAAAAAAAACCTGATT | |
| SwissProt | GGCGCGCTGCTGTTTGATAGCGGCGAAACCGCGGAA | |
| Accession | GCGACCCGCCTGAAACGCACCGCGCGCCGCCGCTAT | |
| No. Q99ZW2 | ACCCGCCGCAAAAACCGCATTTGCTATCTGCAGGAA | |
| Strepto- | ATTTTTAGCAACGAAATGGCGAAAGTGGATGATAGC | |
| coccus | TTTTTTCATCGCCTGGAAGAAAGCTTTCTGGTGGAAG | |
| pyogenes | AAGATAAAAAACATGAACGCCATCCGATTTTTGGCA | |
| | ACATTGTGGATGAAGTGGCGTATCATGAAAAATATC | |
| | CGACCATTTATCATCTGCGCAAAAAACTGGTGGATA | |
| | GCACCGATAAAGCGGATCTGCGCCTGATTTATCTGG | |
| | CGCTGGCGCATATGATTAAATTTCGCGGCCATTTTCT | |
| | GATTGAAGGCGATCTGAACCCGGATAACAGCGATGT | |
| | GGATAAACTGTTTATTCAGCTGGTGCAGACCTATAA | |
| | CCAGCTGTTTGAAGAAAACCCGATTAACGCGAGCGG | |
| | CGTGGATGCGAAAGCGATTCTGAGCGCGCGCCTGAG | |
| | CAAAAGCCGCCGCCTGGAAAACCTGATTGCGCAGCT | |
| | GCCGGGCGAAAAAAAAAACGGCCTGTTTGGCAACCT | |
| | GATTGCGCTGAGCCTGGGCCTGACCCCGAACTTTAA | |
| | AAGCAACTTTGATCTGGCGGAAGATGCGAAACTGCA | |
| | GCTGAGCAAAGATACCTATGATGATGATCTGGATAA | |
| | CCTGCTGGCGCAGATTGGCGATCAGTATGCGGATCT | |
| | GTTTCTGGCGGCGAAAAACCTGAGCGATGCGATTCT | |
| | GCTGAGCGATATTCTGCGCGTGAACACCGAAATTAC | |
| | CAAAGCGCCGCTGAGCGCGAGCATGATTAAACGCTA | |
| | TGATGAACATCATCAGGATCTGACCCTGCTGAAAGC | |
| | GCTGGTGCGCCAGCAGCTGCCGGAAAAATATAAAG | |
| | AAATTTTTTTTGATCAGAGCAAAAACGGCTATGCGG | |
| | GCTATATTGATGGCGGCGCGAGCCAGGAAGAATTTT | |
| | ATAAATTTATTAAACCGATTCTGGAAAAAATGGATG | |
| | GCACCGAAGAACTGCTGGTGAAACTGAACCGCGAA | |
| | GATCTGCTGCGCAAACAGCGCACCTTTGATAACGGC | |
| | AGCATTCCGCATCAGATTCATCTGGGCGAACTGCAT | |
| | GCGATTCTGCGCCGCCAGGAAGATTTTTATCCGTTTC | |
| | TGAAAGATAACCGCGAAAAAATTGAAAAAATTCTG | |
| | ACCTTTCGCATTCCGTATTATGTGGGCCCGCTGGCGC | |
| | GCGGCAACAGCCGCTTTGCGTGGATGACCCGCAAAA | |
| | GCGAAGAAACCATTACCCCGTGGAACTTTGAAGAAG | |
| | TGGTGGATAAAGGCGCGAGCGCGCAGAGCTTTATTG | |
| | AACGCATGACCAACTTTGATAAAAACCTGCCGAACG | |
| | AAAAAGTGCTGCCGAAACATAGCCTGCTGTATGAAT | |
| | ATTTTACCGTGTATAACGAACTGACCAAAGTGAAAT | |
| | ATGTGACCGAAGGCATGCGCAAACCGGCGTTTCTGA | |
| | GCGGCGAACAGAAAAAAGCGATTGTGGATCTGCTGT | |
| | TTAAAACCAACCGCAAAGTGACCGTGAAACAGCTGA | |
| | AAGAAGATTATTTTAAAAAAATTGAATGCTTTGATA | |
| | GCGTGGAAATTAGCGGCGTGGAAGATCGCTTTAACG | |
| | CGAGCCTGGGCACCTATCATGATCTGCTGAAAATTA | |
| | TTAAAGATAAAGATTTTCTGGATAACGAAGAAAACG | |
| | AAGATATTCTGGAAGATATTGTGCTGACCCTGACCC | |
| | TGTTTGAAGATCGCGAAATGATTGAAGAACGCCTGA | |
| | AAACCTATGCGCATCTGTTTGATGATAAAGTGATGA | |
| | AACAGCTGAAACGCCGCCGCTATACCGGCTGGGGCC | |
| | GCCTGAGCCGCAAACTGATTAACGGCATTCGCGATA | |
| | AACAGAGCGGCAAAACCATTCTGGATTTTCTGAAAA | |
| | GCGATGGCTTTGCGAACCGCAACTTTATGCAGCTGA | |
| | TTCATGATGATAGCCTGACCTTTAAAGAAGATATTC | |
| | AGAAAGCGCAGGTGAGCGGCCAGGGCGATAGCCTG | |
| | CATGAACATATTGCGAACCTGGCGGGCAGCCCGGCG | |
| | ATTAAAAAAGGCATTCTGCAGACCGTGAAAGTGGTG | |
| | GATGAACTGGTGAAAGTGATGGGCCGCCATAAACCG | |
| | GAAAACATTGTGATTGAAATGGCGCGCGAAAACCA | |
| | GACCACCCAGAAAGGCCAGAAAAACAGCCGCGAAC | |
| | GCATGAAACGCATTGAAGAAGGCATTAAAGAACTG | |
| | GGCAGCCAGATTCTGAAAGAACATCCGGTGGAAAA | |
| | CACCCAGCTGCAGAACGAAAAACTGTATCTGTATTA | |
| | TCTGCAGAACGGCCGCGATATGTATGTGGATCAGGA | |
| | ACTGGATATTAACCGCCTGAGCGATTATGATGTGGA | |
| | TCATATTGTGCCGCAGAGCTTTCTGAAAGATGATAG | |
| | CATTGATAACAAAGTGCTGACCCGCAGCGATAAAAA | |
| | CCGCGGCAAAAGCGATAACGTGCCGAGCGAAGAAG | |
| | TGGTGAAAAAAATGAAAAACTATTGGCGCCAGCTGC | |
| | TGAACGCGAAACTGATTACCCAGCGCAAATTTGATA | |
| | ACCTGACCAAAGCGGAACGCGGCGGCCTGAGCGAA | |
| | CTGGATAAAGCGGGCTTTATTAAACGCCAGCTGGTG | |
| | GAAACCCGCCAGATTACCAAACATGTGGCGCAGATT | |
| | CTGGATAGCCGCATGAACACCAAATATGATGAAAAC | |
| | GATAAACTGATTCGCGAAGTGAAAGTGATTACCCTG | |
| | AAAAGCAAACTGGTGAGCGATTTTCGCAAAGATTTT | |
| | CAGTTTTATAAAGTGCGCGAAATTAACAACTATCAT | |
| | CATGCGCATGATGCGTATCTGAACGCGGTGGTGGGC | |
| | ACCGCGCTGATTAAAAAATATCCGAAACTGGAAAGC | |
| | GAATTTGTGTATGGCGATTATAAAGTGTATGATGTG | |
| | CGCAAAATGATTGCGAAAAGCGAACAGGAAATTGG | |
| | CAAAGCGACCGCGAAATATTTTTTTTATAGCAACAT | |
| | TATGAACTTTTTTAAAACCGAAATTACCCTGGCGAA | |
| | CGGCGAAATTCGCAAACGCCCGCTGATTGAAACCAA | |
| | CGGCGAAACCGGCGAAATTGTGTGGGATAAAGGCC | |
| | GCGATTTTGCGACCGTGCGCAAAGTGCTGAGCATGC | |
| | CGCAGGTGAACATTGTGAAAAAAACCGAAGTGCAG | |
| | ACCGGCGGCTTTAGCAAAGAAAGCATTCTGCCGAAA | |
| | CGCAACAGCGATAAACTGATTGCGCGCAAAAAAGA | |
| | TTGGGATCCGAAAAAATATGGCGGCTTTGATAGCCC | |
| | GACCGTGGCGTATAGCGTGCTGGTGGTGGCGAAAGT | |
| | GGAAAAAGGCAAAAGCAAAAAACTGAAAAGCGTGA | |
| | AAGAACTGCTGGGCATTACCATTATGGAACGCAGCA | |
| | GCTTTGAAAAAAACCCGATTGATTTTCTGGAAGCGA | |
| | AAGGCTATAAAGAAGTGAAAAAAGATCTGATTATTA | |
| | AACTGCCGAAATATAGCCTGTTTGAACTGGAAAACG | |
| | GCCGCAAACGCATGCTGGCGAGCGCGGGCGAACTG | |
| | CAGAAAGGCAACGAACTGGCGCTGCCGAGCAAATA | |
| | TGTGAACTTTCTGTATCTGGCGAGCCATTATGAAAA | |
| | ACTGAAAGGCAGCCCGGAAGATAACGAACAGAAAC | |
| | AGCTGTTTGTGGAACAGCATAAACATTATCTGGATG | |
| | AAATTATTGAACAGATTAGCGAATTTAGCAAACGCG | |
| | TGATTCTGGCGGATGCGAACCTGGATAAAGTGCTGA | |
| | GCGCGTATAACAAACATCGCGATAAACCGATTCGCG | |
| | AACAGGCGGAAAACATTATTCATCTGTTTACCCTGA | |
| | CCAACCTGGGCGCGCCGGCGGCGTTTAAATATTTTG | |
| | ATACCACCATTGATCGCAAACGCTATACCAGCACCA | |
| | AAGAAGTGCTGGATGCGACCCTGATTCATCAGAGCA | |
| | TTACCGGCCTGTATGAAACCCGCATTGATCTGAGCC | |
| | AGCTGGGCGGCGAT | |

[0314] The prime editors described herein may include canonical SpCas9, or any variant thereof having at least 80%, at least 85%, at least 90%, at least 95%, or at least 99% sequence identity with a wild type Cas9 sequence provided above. These variants may include SpCas9 variants containing one or more mutations, including any known mutation reported with the SwissProt Accession No. Q99ZW2 (SEQ ID NO: 18) entry, which include:

| SpCas9 mutation | |
|---|---|
| (relative to the amino | Function/Characteristic (as reported) |
| acid sequence of | (see UniProtKB - Q99ZW2 |
| the canonical SpCas9 | (CAS9_STRPT1) entry - |
| sequence, SEQ ID NO: 18) | incorporated herein by reference) |
| D10A | Nickase mutant which cleaves the |
| | protospacer strand (but no cleavage |
| | of non-protospacer strand) |
| S15A | Decreased DNA cleavage activity |
| R66A | Decreased DNA cleavage activity |
| R70A | No DNA cleavage |
| R74A | Decreased DNA cleavage |
| R78A | Decreased DNA cleavage |
| 97-150 deletion | No nuclease activity |
| R165A | Decreased DNA cleavage |
| 175-307 deletion | About 50% decreased DNA cleavage |
| 312-409 deletion | No nuclease activity |
| E762A | Nickase |
| H840A | Nickase mutant which cleaves the |
| | non-protospacer strand but does not |
| | cleave the protospacer strand |
| N854A | Nickase |
| N863A | Nickase |
| H982A | Decreased DNA cleavage |
| D986A | Nickase |
| 1099-1368 deletion | No nuclease activity |
| R1333A | Reduced DNA binding |

[0315] Other wild type SpCas9 sequences that may be used in the present disclosure, include:

| Description | Sequence | SEQ ID NO: |
|---|---|---|
| SpCas9 | ATGGATAAGAAATACTCAATAGGCTTAGATATCGGCA | SEQ ID NO: 20 |
| Strepto- | CAAATAGCGTCGGATGGGCGGTGATCACTGATGATTA | |
| coccus | TAAGGTTCCGTCTAAAAAGTTCAAGGTTCTGGGAAAT | |
| pyogenes | ACAGACCGCCACAGTATCAAAAAAAATCTTATAGGGG | |
| MGAS1882 | CTCTTTTATTTGGCAGTGGAGAGACAGCGGAAGCGAC | |
| wild type | TCGTCTCAAACGGACAGCTCGTAGAAGGTATACACGT | |
| NC_017053.1 | CGGAAGAATCGTATTTGTTATCTACAGGAGATTTTTTC | |
| | AAATGAGATGGCGAAAGTAGATGATAGTTTCTTTCATC | |
| | GACTTGAAGAGTCTTTTTTGGTGGAAGAAGACAAGAA | |
| | GCATGAACGTCATCCTATTTTTGGAAATATAGTAGATG | |
| | AAGTTGCTTATCATGAGAAATATCCAACTATCTATCAT | |
| | CTGCGAAAAAAATTGGCAGATTCTACTGATAAAGCGG | |
| | ATTTGCGCTTAATCTATTTGGCCTTAGCGCATATGATT | |
| | AAGTTTCGTGGTCATTTTTTGATTGAGGGAGATTTAAA | |
| | TCCTGATAATAGTGATGTGGACAAACTATTTATCCAGT | |
| | TGGTACAAATCTACAATCAATTATTTGAAGAAAACCCT | |
| | ATTAACGCAAGTAGAGTAGATGCTAAAGCGATTCTTTC | |
| | TGCACGATTGAGTAAATCAAGACGATTAGAAAATCTC | |
| | ATTGCTCAGCTCCCCGGTGAGAAGAGAAATGGCTTGTT | |
| | TGGGAATCTCATTGCTTTGTCATTGGGATTGACCCCTA | |
| | ATTTTAAATCAAATTTTGATTTGGCAGAAGATGCTAAA | |
| | TTACAGCTTTCAAAAGATACTTACGATGATGATTTAGA | |
| | TAATTTATTGGCGCAAATTGGAGATCAATATGCTGATT | |
| | TGTTTTTGGCAGCTAAGAATTTATCAGATGCTATTTTA | |
| | CTTTCAGATATCCTAAGAGTAAATAGTGAAATAACTA | |
| | AGGCTCCCCTATCAGCTTCAATGATTAAGCGCTACGAT | |
| | GAACATCATCAAGACTTGACTCTTTTAAAAGCTTTAGT | |
| | TCGACAACAACTTCCAGAAAAGTATAAAGAAATCTTT | |
| | TTTGATCAATCAAAAAACGGATATGCAGGTTATATTGA | |
| | TGGGGGAGCTAGCCAAGAAGAATTTTATAAATTTATC | |
| | AAACCAATTTTAGAAAAAATGGATGGTACTGAGGAAT | |
| | TATTGGTGAAACTAAATCGTGAAGATTTGCTGCGCAA | |
| | GCAACGGACCTTTGACAACGGCTCTATTCCCCATCAAA | |
| | TTCACTTGGGTGAGCTGCATGCTATTTTGAGAAGACAA | |
| | GAAGACTTTTATCCATTTTTAAAAGACAATCGTGAGAA | |
| | GATTGAAAAAATCTTGACTTTTCGAATTCCTTATTATG | |
| | TTGGTCCATTGGCGCGTGGCAATAGTCGTTTTGCATGG | |
| | ATGACTCGGAAGTCTGAAGAAACAATTACCCCATGGA | |
| | ATTTTGAAGAAGTTGTCGATAAAGGTGCTTCAGCTCAA | |
| | TCATTTATTGAACGCATGACAAACTTTGATAAAAATCT | |
| | TCCAAATGAAAAAGTACTACCAAAACATAGTTTGCTTT | |
| | ATGAGTATTTTACGGTTTATAACGAATTGACAAAGGTC | |
| | AAATATGTTACTGAGGGAATGCGAAAACCAGCATTTC | |
| | TTTCAGGTGAACAGAAGAAAGCCATTGTTGATTTACTC | |
| | TTCAAAACAAATCGAAAAGTAACCGTTAAGCAATTAA | |
| | AAGAAGATTATTTCAAAAAAATAGAATGTTTTGATAG | |
| | TGTTGAAATTTCAGGAGTTGAAGATAGATTTAATGCTT | |
| | CATTAGGCGCCTACCATGATTTGCTAAAAATTATTAAA | |
| | GATAAAGATTTTTTGGATAATGAAGAAAATGAAGATA | |
| | TCTTAGAGGATATTGTTTTAACATTGACCTTATTTGAA | |
| | GATAGGGGGATGATTGAGGAAAGACTTAAAACATATG | |
| | CTCACCTCTTTGATGATAAGGTGATGAAACAGCTTAAA | |
| | CGTCGCCGTTATACTGGTTGGGGACGTTTGTCTCGAAA | |
| | ATTGATTAATGGTATTAGGGATAAGCAATCTGGCAAA | |
| | ACAATATTAGATTTTTTGAAATCAGATGGTTTTGCCAA | |
| | TCGCAATTTTATGCAGCTGATCCATGATGATAGTTTGA | |
| | CATTTAAAGAAGATATTCAAAAAGCACAGGTGTCTGG | |
| | ACAAGGCCATAGTTTACATGAACAGATTGCTAACTTA | |
| | GCTGGCAGTCCTGCTATTAAAAAAGGTATTTTACAGAC | |
| | TGTAAAAATTGTTGATGAACTGGTCAAAGTAATGGGG | |
| | CATAAGCCAGAAAATATCGTTATTGAAATGGCACGTG | |
| | AAAATCAGACAACTCAAAAGGGCCAGAAAAATTCGCG | |
| | AGAGCGTATGAAACGAATCGAAGAAGGTATCAAAGA | |
| | ATTAGGAAGTCAGATTCTTAAAGAGCATCCTGTTGAA | |
| | AATACTCAATTGCAAAATGAAAAGCTCTATCTCTATTA | |
| | TCTACAAAATGGAAGAGACATGTATGTGGACCAAGAA | |
| | TTAGATATTAATCGTTTAAGTGATTATGATGTCGATCA | |
| | CATTGTTCCACAAAGTTTCATTAAAGACGATTCAATAG | |
| | ACAATAAGGTACTAACGCGTTCTGATAAAAATCGTGG | |
| | TAAATCGGATAACGTTCCAAGTGAAGAAGTAGTCAAA | |
| | AAGATGAAAAACTATTGGAGACAACTTCTAAACGCCA | |
| | AGTTAATCACTCAACGTAAGTTTGATAATTTAACGAAA | |
| | GCTGAACGTGGAGGTTTGAGTGAACTTGATAAAGCTG | |
| | GTTTTATCAAACGCCAATTGGTTGAAACTCGCCAAATC | |
| | ACTAAGCATGTGGCACAAATTTTGGATAGTCGCATGA | |
| | ATACTAAATACGATGAAAATGATAAACTTATTCGAGA | |
| | GGTTAAAGTGATTACCTTAAAATCTAAATTAGTTTCTG | |
| | ACTTCCGAAAAGATTTCCAATTCTATAAAGTACGTGAG | |
| | ATTAACAATTACCATCATGCCCATGATGCGTATCTAAA | |
| | TGCCGTCGTTGGAACTGCTTTGATTAAGAAATATCCAA | |
| | AACTTGAATCGGAGTTTGTCTATGGTGATTATAAAGTT | |
| | TATGATGTTCGTAAAATGATTGCTAAGTCTGAGCAAGA | |
| | AATAGGCAAAGCAACCGCAAAATATTTCTTTTACTCTA | |
| | ATATCATGAACTTCTTCAAAACAGAAATTACACTTGCA | |
| | AATGGAGAGATTCGCAAACGCCCTCTAATCGAAACTA | |
| | ATGGGGAAACTGGAGAAATTGTCTGGGATAAAGGGCG | |
| | AGATTTTGCCACAGTGCGCAAAGTATTGTCCATGCCCC | |
| | AAGTCAATATTGTCAAGAAAACAGAAGTACAGACAGG | |
| | CGGATTCTCCAAGGAGTCAATTTTACCAAAAAGAAAT | |
| | TCGGACAAGCTTATTGCTCGTAAAAAAGACTGGGATC | |
| | CAAAAAAATATGGTGGTTTTGATAGTCCAACGGTAGC | |
| | TTATTCAGTCCTAGTGGTTGCTAAGGTGGAAAAAGGG | |
| | AAATCGAAGAAGTTAAAATCCGTTAAAGAGTTACTAG | |
| | GGATCACAATTATGGAAAGAAGTTCCTTTGAAAAAAA | |
| | TCCGATTGACTTTTTAGAAGCTAAAGGATATAAGGAA | |
| | GTTAAAAAAGACTTAATCATTAAACTACCTAAATATA | |
| | GTCTTTTTGAGTTAGAAAACGGTCGTAAACGGATGCTG | |
| | GCTAGTGCCGGAGAATTACAAAAAGGAAATGAGCTGG | |
| | CTCTGCCAAGCAAATATGTGAATTTTTTATATTTAGCT | |
| | AGTCATTATGAAAAGTTGAAGGGTAGTCCAGAAGATA | |
| | ACGAACAAAAACAATTGTTTGTGGAGCAGCATAAGCA | |
| | TTATTTAGATGAGATTATTGAGCAAATCAGTGAATTTT | |
| | CTAAGCGTGTTATTTTAGCAGATGCCAATTTAGATAAA | |
| | GTTCTTAGTGCATATAACAAACATAGAGACAAACCAA | |
| | TACGTGAACAAGCAGAAAATATTATTCATTTATTTACG | |
| | TTGACGAATCTTGGAGCTCCCGCTGCTTTTAAATATTT | |
| | TGATACAACAATTGATCGTAAACGATATACGTCTACA | |
| | AAAGAAGTTTTAGATGCCACTCTTATCCATCAATCCAT | |
| | CACTGGTCTTTATGAAACACGCATTGATTTGAGTCAGC | |
| | TAGGAGGTGACTGA | |
| SpCas9 | MDKKYSIGLDIGTNSVGWAVITDDYKVPSKKFKVLGNT | SEQ ID NO: 21 |
| Strepto- | DRHSIKKNLIGALLFGSGETAEATRLKRTARRRYTRRKN | |
| coccus | RICYLQEIFSNEMAKVDDSFFHRLEESFLVEEDKKHERHP | |
| pyogenes | IFGNIVDEVAYHEKYPTIYHLRKKLADSTDKADLRLIYLA | |
| MGAS1882 | LAHMIKFRGHFLIEGDLNPDNSDVDKLFIQLVQIYNQLFE | |
| wild type | ENPINASRVDAKAILSARLSKSRRLENLIAQLPGEKRNGL | |
| NC_017053.1 | FGNLIALSLGLTPNFKSNFDLAEDAKLQLSKDTYDDDLD | |
| | NLLAQIGDQYADLFLAAKNLSDAILLSDILRVNSEITKAP | |
| | LSASMIKRYDEHHQDLTLLKALVRQQLPEKYKEIFFDQS | |
| | KNGYAGYIDGGASQEEFYKFIKPILEKMDGTEELLVKLN | |
| | REDLLRKQRTFDNGSIPHQIHLGELHAILRRQEDFYPFLK | |
| | DNREKIEKILTFRIPYYVGPLARGNSRFAWMTRKSEETIT | |
| | PWNFEEVVDKGASAQSFIERMTNFDKNLPNEKVLPKHSLL | |
| | YEYFTVYNELTKVKYVTEGMRKPAFLSGEQKKAIVDLLF | |
| | KTNRKVTVKQLKEDYFKKIECFDSVEISGVEDRFNASLG | |
| | AYHDLLKIIKDKDFLDNEENEDILEDIVLTLTLFEDRGMI | |
| | EERLKTYAHLFDDKVMKQLKRRRYTGWGRLSRKLINGIR | |
| | DKQSGKTILDFLKSDGFANRNFMQLIHDDSLTFKEDIQKA | |
| | QVSGQGHSLHEQIANLAGSPAIKKGILQTVKIVDELVKV | |
| | MGHKPENIVIEMARENQTTQKGQKNSRERMKRIEEGIKE | |
| | LGSQILKEHPVENTQLQNEKLYLYYLQNGRDMYVDQEL | |
| | DINRLSDYDVDHIVPQSFIKDDSIDNKVLTRSDKNRGKSD | |
| | NVPSEEVVKKMKNYWRQLLNAKLITQRKFDNLTKAERG | |
| | GLSELDKAGFIKRQLVETRQITKHVAQILDSRMNTKYDE | |
| | NDKLIREVKVITLKSKLVSDFRKDFQFYKVREINNYHHA | |
| | HDAYLNAVVGTALIKKYPKLESEFVYGDYKVYDVRKMI | |
| | AKSEQEIGKATAKYFFYSNIMNFFKTEITLANGEIRKRPL | |
| | IETNGETGEIVWDKGRDFATVRKVLSMPQVNIVKKTEVQ | |
| | TGGFSKESILPKRNSDKLIARKKDWDPKKYGGFDSPTVA | |
| | YSVLVVAKVEKGKSKKLKSVKELLGITIMERSSFEKNPID | |
| | FLEAKGYKEVKKDLIIKLPKYSLFELENGRKRMLASAGE | |
| | LQKGNELALPSKYVNFLYLASHYEKLKGSPEDNEQKQLF | |
| | VEQHKHYLDEIIEQISEFSKRVILADANLDKVLSAYNKHR | |
| | DKPIREQAENIIHLFTLTNLGAPAAFKYFDTTIDRKRYTS | |
| | TKEVLDATLIHQSITGLYETRIDLSQLGGD | |
| SpCas9 | ATGGATAAAAAGTATTCTATTGGTTTAGACATCGGCAC | SEQ ID NO: 22 |
| Strepto- | TAATTCCGTTGGATGGGCTGTCATAACCGATGAATACA | |
| coccus | AAGTACCTTCAAAGAAATTTAAGGTGTTGGGGAACAC | |
| pyogenes | AGACCGTCATTCGATTAAAAAGAATCTTATCGGTGCCC | |
| wild type | TCCTATTCGATAGTGGCGAAACGGCAGAGGCGACTCG | |
| SWBC2D7W014 | CCTGAAACGAACCGCTCGGAGAAGGTATACACGTCGC | |
| | AAGAACCGAATATGTTACTTACAAGAAATTTTTAGCA | |
| | ATGAGATGGCCAAAGTTGACGATTCTTTCTTTCACCGT | |
| | TTGGAAGAGTCCTTCCTTGTCGAAGAGGACAAGAAAC | |
| | ATGAACGGCACCCCATCTTTGGAAACATAGTAGATGA | |
| | GGTGGCATATCATGAAAAGTACCCAACGATTTATCAC | |
| | CTCAGAAAAAAGCTAGTTGACTCAACTGATAAAGCGG | |
| | ACCTGAGGTTAATCTACTTGGCTCTTGCCCATATGATA | |
| | AAGTTCCGTGGGCACTTTCTCATTGAGGGTGATCTAAA | |
| | TCCGGACAACTCGGATGTCGACAAACTGTTCATCCAGT | |
| | TAGTACAAACCTATAATCAGTTGTTTGAAGAGAACCCT | |
| | ATAAATGCAAGTGGCGTGGATGCGAAGGCTATTCTTA | |
| | GCGCCCGCCTCTCTAAATCCCGACGGCTAGAAAACCT | |
| | GATCGCACAATTACCCGGAGAGAAGAAAAATGGGTTG | |
| | TTCGGTAACCTTATAGCGCTCTCACTAGGCCTGACACC | |
| | AAATTTTAAGTCGAACTTCGACTTAGCTGAAGATGCCA | |
| | AATTGCAGCTTAGTAAGGACACGTACGATGACGATCT | |
| | CGACAATCTACTGGCACAAATTGGAGATCAGTATGCG | |
| | GACTTATTTTTGGCTGCCAAAAACCTTAGCGATGCAAT | |
| | CCTCCTATCTGACATACTGAGAGTTAATACTGAGATTA | |
| | CCAAGGCGCCGTTATCCGCTTCAATGATCAAAAGGTA | |
| | CGATGAACATCACCAAGACTTGACACTTCTCAAGGCC | |
| | CTAGTCCGTCAGCAACTGCCTGAGAAATATAAGGAAA | |
| | TATTCTTTGATCAGTCGAAAAACGGGTACGCAGGTTAT | |
| | ATTGACGGCGGAGCGAGTCAAGAGGAATTCTACAAGT | |
| | TTATCAAACCCATATTAGAGAAGATGGATGGGACGGA | |
| | AGAGTTGCTTGTAAAACTCAATCGCGAAGATCTACTGC | |
| | GAAAGCAGCGGACTTTCGACAACGGTAGCATTCCACA | |
| | TCAAATCCACTTAGGCGAATTGCATGCTATACTTAGAA | |
| | GGCAGGAGGATTTTTATCCGTTCCTCAAAGACAATCGT | |
| | GAAAAGATTGAGAAAATCCTAACCTTTCGCATACCTTA | |
| | CTATGTGGGACCCCTGGCCCGAGGGAACTCTCGGTTCG | |
| | CATGGATGACAAGAAAGTCCGAAGAAACGATTACTCC | |
| | ATGGAATTTTGAGGAAGTTGTCGATAAAGGTGCGTCA | |
| | GCTCAATCGTTCATCGAGAGGATGACCAACTTTGACA | |
| | AGAATTTACCGAACGAAAAAGTATTGCCTAAGCACAG | |
| | TTTACTTTACGAGTATTTCACAGTGTACAATGAACTCA | |
| | CGAAAGTTAAGTATGTCACTGAGGGCATGCGTAAACC | |
| | CGCCTTTCTAAGCGGAGAACAGAAGAAAGCAATAGTA | |
| | GATCTGTTATTCAAGACCAACCGCAAAGTGACAGTTA | |
| | AGCAATTGAAAGAGGACTACTTTAAGAAAATTGAATG | |
| | CTTCGATTCTGTCGAGATCTCCGGGGTAGAAGATCGAT | |
| | TTAATGCGTCACTTGGTACGTATCATGACCTCCTAAAG | |
| | ATAATTAAAGATAAGGACTTCCTGGATAACGAAGAGA | |
| | ATGAAGATATCTTAGAAGATATAGTGTTGACTCTTACC | |
| | CTCTTTGAAGATCGGGAAATGATTGAGGAAAGACTAA | |
| | AAACATACGCTCACCTGTTCGACGATAAGGTTATGAA | |
| | ACAGTTAAAGAGGCGTCGCTATACGGGCTGGGGACGA | |
| | TTGTCGCGGAAACTTATCAACGGGATAAGAGACAAGC | |
| | AAAGTGGTAAAACTATTCTCGATTTTCTAAAGAGCGAC | |
| | GGCTTCGCCAATAGGAACTTTATGCAGCTGATCCATGA | |
| | TGACTCTTTAACCTTCAAAGAGGATATACAAAAGGCA | |
| | CAGGTTTCCGGACAAGGGGACTCATTGCACGAACATA | |
| | TTGCGAATCTTGCTGGTTCGCCAGCCATCAAAAAGGGC | |
| | ATACTCCAGACAGTCAAAGTAGTGGATGAGCTAGTTA | |
| | AGGTCATGGGACGTCACAAACCGGAAAACATTGTAAT | |
| | CGAGATGGCACGCGAAAATCAAACGACTCAGAAGGG | |
| | GCAAAAAAACAGTCGAGAGCGGATGAAGAGAATAGA | |
| | AGAGGGTATTAAAGAACTGGGCAGCCAGATCTTAAAG | |
| | GAGCATCCTGTGGAAAATACCCAATTGCAGAACGAGA | |
| | AACTTTACCTCTATTACCTACAAAATGGAAGGGACATG | |
| | TATGTTGATCAGGAACTGGACATAAACCGTTTATCTGA | |
| | TTACGACGTCGATCACATTGTACCCCAATCCTTTTTGA | |
| | AGGACGATTCAATCGACAATAAAGTGCTTACACGCTC | |
| | GGATAAGAACCGAGGGAAAAGTGACAATGTTCCAAGC | |
| | GAGGAAGTCGTAAAGAAAATGAAGAACTATTGGCGGC | |
| | AGCTCCTAAATGCGAAACTGATAACGCAAAGAAAGTT | |
| | CGATAACTTAACTAAAGCTGAGAGGGGTGGCTTGTCT | |
| | GAACTTGACAAGGCCGGATTTATTAAACGTCAGCTCGT | |
| | GGAAACCCGCCAAATCACAAAGCATGTTGCACAGATA | |
| | CTAGATTCCCGAATGAATACGAAATACGACGAGAACG | |
| | ATAAGCTGATTCGGGAAGTCAAAGTAATCACTTTAAA | |
| | GTCAAAATTGGTGTCGGACTTCAGAAAGGATTTTCAAT | |
| | TCTATAAAGTTAGGGAGATAAATAACTACCACCATGC | |
| | GCACGACGCTTATCTTAATGCCGTCGTAGGGACCGCAC | |
| | TCATTAAGAAATACCCGAAGCTAGAAAGTGAGTTTGT | |
| | GTATGGTGATTACAAAGTTTATGACGTCCGTAAGATGA | |
| | TCGCGAAAAGCGAACAGGAGATAGGCAAGGCTACAG | |
| | CCAAATACTTCTTTTATTCTAACATTATGAATTTCTTTA | |
| | AGACGGAAATCACTCTGGCAAACGGAGAGATACGCAA | |
| | ACGACCTTTAATTGAAACCAATGGGGAGACAGGTGAA | |
| | ATCGTATGGGATAAGGGCCGGGACTTCGCGACGGTGA | |
| | GAAAAGTTTTGTCCATGCCCCAAGTCAACATAGTAAA | |
| | GAAAACTGAGGTGCAGACCGGAGGGTTTTCAAAGGAA | |
| | TCGATTCTTCCAAAAAGGAATAGTGATAAGCTCATCGC | |
| | TCGTAAAAAGGACTGGGACCCGAAAAAGTACGGTGGC | |
| | TTCGATAGCCCTACAGTTGCCTATTCTGTCCTAGTAGT | |
| | GGCAAAAGTTGAGAAGGGAAAATCCAAGAAACTGAA | |
| | GTCAGTCAAAGAATTATTGGGGATAACGATTATGGAG | |
| | CGCTCGTCTTTTGAAAAGAACCCCATCGACTTCCTTGA | |
| | GGCGAAAGGTTACAAGGAAGTAAAAAAGGATCTCATA | |
| | ATTAAACTACCAAAGTATAGTCTGTTTGAGTTAGAAAA | |
| | TGGCCGAAAACGGATGTTGGCTAGCGCCGGAGAGCTT | |
| | CAAAAGGGGAACGAACTCGCACTACCGTCTAAATACG | |
| | TGAATTTCCTGTATTTAGCGTCCCATTACGAGAAGTTG | |
| | AAAGGTTCACCTGAAGATAACGAACAGAAGCAACTTT | |
| | TTGTTGAGCAGCACAAACATTATCTCGACGAAATCATA | |
| | GAGCAAATTTCGGAATTCAGTAAGAGAGTCATCCTAG | |
| | CTGATGCCAATCTGGACAAAGTATTAAGCGCATACAA | |
| | CAAGCACAGGGATAAACCCATACGTGAGCAGGCGGAA | |
| | AATATTATCCATTTGTTTACTCTTACCAACCTCGGCGCT | |
| | CCAGCCGCATTCAAGTATTTTGACACAACGATAGATCG | |
| | CAAACGATACACTTCTACCAAGGAGGTGCTAGACGCG | |
| | ACACTGATTCACCAATCCATCACGGGATTATATGAAAC | |
| | TCGGATAGATTTGTCACAGCTTGGGGGTGACGGATCCC | |
| | CCAAGAAGAAGAGGAAAGTCTCGAGCGACTACAAAG | |
| | ACCATGACGGTGATTATAAAGATCATGACATCGATTA | |
| | CAAGGATGACGATGACAAGGCTGCAGGA | |
| SpCas9 | MDKKYSIGLDIGTNSVGWAVITDEYKVPSKKFKVLGNTD | SEQ ID NO: 23 |
| Strepto- | RHSIKKNLIGALLFDSGETAEATRLKRTARRRYTRRKNRI | |
| coccus | CYLQEIFSNEMAKVDDSFFHRLEESFLVEEDKKHERHPIF | |
| pyogenes | GNIVDEVAYHEKYPTIYHLRKKLVDSTDKADLRLIYLAL | |
| wild type | AHMIKFRGHFLIEGDLNPDNSDVDKLFIQLVQTYNQLFEE | |
| Encoded | NPINASGVDAKAILSARLSKSRRLENLIAQLPGEKKNGLF | |
| product of | GNLIALSLGLTPNFKSNFDLAEDAKLQLSKDTYDDDLDN | |
| SWBC2D7W014 | LLAQIGDQYADLFLAAKNLSDAILLSDILRVNTEITKAPL | |
| | SASMIKRYDEHHQDLTLLKALVRQQLPEKYKEIFFDQSKN | |
| | GYAGYIDGGASQEEFYKFIKPILEKMDGTEELLVKLNRE | |
| | DLLRKQRTFDNGSIPHQIHLGELHAILRRQEDFYPFLKDN | |
| | REKIEKILTFRIPYYVGPLARGNSRFAWMTRKSEETITPW | |
| | NFEEVVDKGASAQSFIERMTNFDKNLPNEKVLPKHSLLY | |
| | EYFTVYNELTKVKYVTEGMRKPAFLSGEQKKAIVDLLFK | |
| | TNRKVTVKQLKEDYFKKIECFDSVEISGVEDRFNASLGT | |
| | YHDLLKIIKDKDFLDNEENEDILEDIVLTLTLFEDREMIE | |
| | ERLKTYAHLFDDKVMKQLKRRRYTGWGRLSRKLINGIRD | |
| | KQSGKTILDFLKSDGFANRNFMQLIHDDSLTFKEDIQKAQ | |
| | VSGQGDSLHEHIANLAGSPAIKKGILQTVKVVDELVKVM | |
| | GRHKPENIVIEMARENQTTQKGQKNSRERMKRIEEGIKE | |
| | LGSQILKEHPVENTQLQNEKLYLYYLQNGRDMYVDQEL | |
| | DINRLSDYDVDHIVPQSFLKDDSIDNKVLTRSDKNRGKS | |
| | DNVPSEEVVKKMKNYWRQLLNAKLITQRKFDNLTKAER | |
| | GGLSELDKAGFIKRQLVETRQITKHVAQILDSRMNTKYD | |
| | ENDKLIREVKVITLKSKLVSDFRKDFQFYKVREINNYHH | |
| | AHDAYLNAVVGTALIKKYPKLESEFVYGDYKVYDVRK | |
| | MIAKSEQEIGKATAKYFFYSNIMNFFKTEITLANGEIRKR | |
| | PLIETNGETGEIVWDKGRDFATVRKVLSMPQVNIVKKTEV | |
| | QTGGFSKESILPKRNSDKLIARKKDWDPKKYGGFDSPTV | |
| | AYSVLVVAKVEKGKSKKLKSVKELLGITIMERSSFEKNPI | |
| | DFLEAKGYKEVKKDLIIKLPKYSLFELENGRKRMLASAG | |
| | ELQKGNELALPSKYVNFLYLASHYEKLKGSPEDNEQKQL | |
| | FVEQHKHYLDEIIEQISEFSKRVILADANLDKVLSAYNKH | |
| | RDKPIREQAENIIHLFTLTNLGAPAAFKYFDTTIDRKRYT | |
| | STKEVLDATLIHQSITGLYETRIDLSQLGGDGSPKKKRKV | |
| | SSDYKDHDGDYKDHDIDYKDDDDKAAG | |
| SpCas9 | ATGGATAAGAAATACTCAATAGGCTTAGATATCGGCA | SEQ ID NO: 24 |
| Strepto- | CAAATAGCGTCGGATGGGCGGTGATCACTGATGAATA | |
| coccus | TAAGGTTCCGTCTAAAAAGTTCAAGGTTCTGGGAAAT | |
| pyogenes | ACAGACCGCCACAGTATCAAAAAAAATCTTATAGGGG | |
| M1GAS wild | CTCTTTTATTTGACAGTGGAGAGACAGCGGAAGCGAC | |
| type | TCGTCTCAAACGGACAGCTCGTAGAAGGTATACACGT | |
| NC_002737.2 | CGGAAGAATCGTATTTGTTATCTACAGGAGATTTTTTC | |
| | AAATGAGATGGCGAAAGTAGATGATAGTTTCTTTCATC | |
| | GACTTGAAGAGTCTTTTTTGGTGGAAGAAGACAAGAA | |
| | GCATGAACGTCATCCTATTTTTGGAAATATAGTAGATG | |
| | AAGTTGCTTATCATGAGAAATATCCAACTATCTATCAT | |
| | CTGCGAAAAAAATTGGTAGATTCTACTGATAAAGCGG | |
| | ATTTGCGCTTAATCTATTTGGCCTTAGCGCATATGATT | |
| | AAGTTTCGTGGTCATTTTTTGATTGAGGGAGATTTAAA | |
| | TCCTGATAATAGTGATGTGGACAAACTATTTATCCAGT | |
| | TGGTACAAACCTACAATCAATTATTTGAAGAAAACCCT | |
| | ATTAACGCAAGTGGAGTAGATGCTAAAGCGATTCTTTC | |
| | TGCACGATTGAGTAAATCAAGACGATTAGAAAATCTC | |
| | ATTGCTCAGCTCCCCGGTGAGAAGAAAAATGGCTTATT | |
| | TGGGAATCTCATTGCTTTGTCATTGGGTTTGACCCCTA | |
| | ATTTTAAATCAAATTTTGATTTGGCAGAAGATGCTAAA | |
| | TTACAGCTTTCAAAAGATACTTACGATGATGATTTAGA | |
| | TAATTTATTGGCGCAAATTGGAGATCAATATGCTGATT | |
| | TGTTTTTGGCAGCTAAGAATTTATCAGATGCTATTTTA | |
| | CTTTCAGATATCCTAAGAGTAAATACTGAAATAACTAA | |
| | GGCTCCCCTATCAGCTTCAATGATTAAACGCTACGATG | |
| | AACATCATCAAGACTTGACTCTTTTAAAAGCTTTAGTT | |
| | CGACAACAACTTCCAGAAAAGTATAAAGAAATCTTTT | |
| | TTGATCAATCAAAAAACGGATATGCAGGTTATATTGAT | |
| | GGGGGAGCTAGCCAAGAAGAATTTTATAAATTTATCA | |
| | AACCAATTTTAGAAAAAATGGATGGTACTGAGGAATT | |
| | ATTGGTGAAACTAAATCGTGAAGATTTGCTGCGCAAG | |
| | CAACGGACCTTTGACAACGGCTCTATTCCCCATCAAAT | |
| | TCACTTGGGTGAGCTGCATGCTATTTTGAGAAGACAAG | |
| | AAGACTTTTATCCATTTTTAAAAGACAATCGTGAGAAG | |
| | ATTGAAAAAATCTTGACTTTTCGAATTCCTTATTATGTT | |
| | GGTCCATTGGCGCGTGGCAATAGTCGTTTTGCATGGAT | |
| | GACTCGGAAGTCTGAAGAAACAATTACCCCATGGAAT | |
| | TTTGAAGAAGTTGTCGATAAAGGTGCTTCAGCTCAATC | |
| | ATTTATTGAACGCATGACAAACTTTGATAAAAATCTTC | |
| | CAAATGAAAAAGTACTACCAAAACATAGTTTGCTTTAT | |
| | GAGTATTTTACGGTTTATAACGAATTGACAAAGGTCAA | |
| | ATATGTTACTGAAGGAATGCGAAAACCAGCATTTCTTT | |
| | CAGGTGAACAGAAGAAAGCCATTGTTGATTTACTCTTC | |
| | AAAACAAATCGAAAAGTAACCGTTAAGCAATTAAAAG | |
| | AAGATTATTTCAAAAAAATAGAATGTTTTGATAGTGTT | |
| | GAAATTTCAGGAGTTGAAGATAGATTTAATGCTTCATT | |
| | AGGTACCTACCATGATTTGCTAAAAATTATTAAAGATA | |
| | AAGATTTTTTGGATAATGAAGAAAATGAAGATATCTT | |
| | AGAGGATATTGTTTTAACATTGACCTTATTTGAAGATA | |
| | GGGAGATGATTGAGGAAAGACTTAAAACATATGCTCA | |
| | CCTCTTTGATGATAAGGTGATGAAACAGCTTAAACGTC | |
| | GCCGTTATACTGGTTGGGGACGTTTGTCTCGAAAATTG | |
| | ATTAATGGTATTAGGGATAAGCAATCTGGCAAAACAA | |
| | TATTAGATTTTTTGAAATCAGATGGTTTTGCCAATCGC | |
| | AATTTTATGCAGCTGATCCATGATGATAGTTTGACATT | |
| | TAAAGAAGACATTCAAAAAGCACAAGTGTCTGGACAA | |
| | GGCGATAGTTTACATGAACATATTGCAAATTTAGCTGG | |
| | TAGCCCTGCTATTAAAAAAGGTATTTTACAGACTGTAA | |
| | AAGTTGTTGATGAATTGGTCAAAGTAATGGGGCGGCA | |
| | TAAGCCAGAAAATATCGTTATTGAAATGGCACGTGAA | |
| | AATCAGACAACTCAAAAGGGCCAGAAAAATTCGCGAG | |
| | AGCGTATGAAACGAATCGAAGAAGGTATCAAAGAATT | |
| | AGGAAGTCAGATTCTTAAAGAGCATCCTGTTGAAAAT | |
| | ACTCAATTGCAAAATGAAAAGCTCTATCTCTATTATCT | |
| | CCAAAATGGAAGAGACATGTATGTGGACCAAGAATTA | |
| | GATATTAATCGTTTAAGTGATTATGATGTCGATCACAT | |
| | TGTTCCACAAAGTTTCCTTAAAGACGATTCAATAGACA | |
| | ATAAGGTCTTAACGCGTTCTGATAAAAATCGTGGTAA | |
| | ATCGGATAACGTTCCAAGTGAAGAAGTAGTCAAAAAG | |
| | ATGAAAAACTATTGGAGACAACTTCTAAACGCCAAGT | |
| | TAATCACTCAACGTAAGTTTGATAATTTAACGAAAGCT | |
| | GAACGTGGAGGTTTGAGTGAACTTGATAAAGCTGGTT | |
| | TTATCAAACGCCAATTGGTTGAAACTCGCCAAATCACT | |
| | AAGCATGTGGCACAAATTTTGGATAGTCGCATGAATA | |
| | CTAAATACGATGAAAATGATAAACTTATTCGAGAGGT | |
| | TAAAGTGATTACCTTAAAATCTAAATTAGTTTCTGACT | |
| | TCCGAAAAGATTTCCAATTCTATAAAGTACGTGAGATT | |
| | AACAATTACCATCATGCCCATGATGCGTATCTAAATGC | |
| | CGTCGTTGGAACTGCTTTGATTAAGAAATATCCAAAAC | |
| | TTGAATCGGAGTTTGTCTATGGTGATTATAAAGTTTAT | |
| | GATGTTCGTAAAATGATTGCTAAGTCTGAGCAAGAAA | |
| | TAGGCAAAGCAACCGCAAAATATTTCTTTTACTCTAAT | |
| | ATCATGAACTTCTTCAAAACAGAAATTACACTTGCAAA | |
| | TGGAGAGATTCGCAAACGCCCTCTAATCGAAACTAAT | |
| | GGGGAAACTGGAGAAATTGTCTGGGATAAAGGGCGAG | |
| | ATTTTGCCACAGTGCGCAAAGTATTGTCCATGCCCCAA | |
| | GTCAATATTGTCAAGAAAACAGAAGTACAGACAGGCG | |
| | GATTCTCCAAGGAGTCAATTTTACCAAAAAGAAATTC | |
| | GGACAAGCTTATTGCTCGTAAAAAAGACTGGGATCCA | |
| | AAAAAATATGGTGGTTTTGATAGTCCAACGGTAGCTTA | |
| | TTCAGTCCTAGTGGTTGCTAAGGTGGAAAAAGGGAAA | |
| | TCGAAGAAGTTAAAATCCGTTAAAGAGTTACTAGGGA | |
| | TCACAATTATGGAAAGAAGTTCCTTTGAAAAAAATCC | |
| | GATTGACTTTTTAGAAGCTAAAGGATATAAGGAAGTT | |
| | AAAAAAGACTTAATCATTAAACTACCTAAATATAGTCT | |
| | TTTTGAGTTAGAAAACGGTCGTAAACGGATGCTGGCT | |
| | AGTGCCGGAGAATTACAAAAAGGAAATGAGCTGGCTC | |
| | TGCCAAGCAAATATGTGAATTTTTTATATTTAGCTAGT | |
| | CATTATGAAAAGTTGAAGGGTAGTCCAGAAGATAACG | |
| | AACAAAAACAATTGTTTGTGGAGCAGCATAAGCATTA | |
| | TTTAGATGAGATTATTGAGCAAATCAGTGAATTTTCTA | |
| | AGCGTGTTATTTTAGCAGATGCCAATTTAGATAAAGTT | |
| | CTTAGTGCATATAACAAACATAGAGACAAACCAATAC | |
| | GTGAACAAGCAGAAAATATTATTCATTTATTTACGTTG | |
| | ACGAATCTTGGAGCTCCCGCTGCTTTTAAATATTTTGA | |
| | TACAACAATTGATCGTAAACGATATACGTCTACAAAA | |
| | GAAGTTTTAGATGCCACTCTTATCCATCAATCCATCAC | |
| | TGGTCTTTATGAAACACGCATTGATTTGAGTCAGCTAG | |
| | GAGGTGACTGA | |
| SpCas9 | MDKKYSIGLDIGTNSVGWAVITDEYKVPSKKFKVLGNTD | SEQ ID NO: 25 |
| Strepto- | RHSIKKNLIGALLFDSGETAEATRLKRTARRRYTRRKNRI | |
| coccus | CYLQEIFSNEMAKVDDSFFHRLEESFLVEEDKKHERHPIF | |
| pyogenes | GNIVDEVAYHEKYPTIYHLRKKLVDSTDKADLRLIYLAL | |
| M1GAS wild | AHMIKFRGHFLIEGDLNPDNSDVDKLFIQLVQTYNQLFEE | |
| type | NPINASGVDAKAILSARLSKSRRLENLIAQLPGEKKNGLF | |
| Encoded | GNLIALSLGLTPNFKSNFDLAEDAKLQLSKDTYDDDLDN | |
| product of | LLAQIGDQYADLFLAAKNLSDAILLSDILRVNTEITKAPL | |
| NC_002737.2 | SASMIKRYDEHHQDLTLLKALVRQQLPEKYKEIFFDQSKN | |
| (100% | GYAGYIDGGASQEEFYKFIKPILEKMDGTEELLVKLNRE | |
| identical | DLLRKQRTFDNGSIPHQIHLGELHAILRRQEDFYPFLKDN | |
| to the | REKIEKILTFRIPYYVGPLARGNSRFAWMTRKSEETITPW | |
| canonical | NFEEVVDKGASAQSFIERMTNFDKNLPNEKVLPKHSLLY | |
| Q99ZW2 | EYFTVYNELTKVKYVTEGMRKPAFLSGEQKKAIVDLLFK | |
| wild type) | TNRKVTVKQLKEDYFKKIECFDSVEISGVEDRFNASLGT | |
| | YHDLLKIIKDKDFLDNEENEDILEDIVLTLTLFEDREMIE | |
| | ERLKTYAHLFDDKVMKQLKRRRYTGWGRLSRKLINGIRD | |
| | KQSGKTILDFLKSDGFANRNFMQLIHDDSLTFKEDIQKAQ | |
| | VSGQGDSLHEHIANLAGSPAIKKGILQTVKVVDELVKVM | |
| | GRHKPENIVIEMARENQTTQKGQKNSRERMKRIEEGIKE | |
| | LGSQILKEHPVENTQLQNEKLYLYYLQNGRDMYVDQEL | |
| | DINRLSDYDVDHIVPQSFLKDDSIDNKVLTRSDKNRGKS | |
| | DNVPSEEVVKKMKNYWRQLLNAKLITQRKFDNLTKAER | |
| | GGLSELDKAGFIKRQLVETRQITKHVAQILDSRMNTKYD | |
| | ENDKLIREVKVITLKSKLVSDFRKDFQFYKVREINNYHH | |
| | AHDAYLNAVVGTALIKKYPKLESEFVYGDYKVYDVRK | |
| | MIAKSEQEIGKATAKYFFYSNIMNFFKTEITLANGEIRKR | |
| | PLIETNGETGEIVWDKGRDFATVRKVLSMPQVNIVKKTEV | |
| | QTGGFSKESILPKRNSDKLIARKKDWDPKKYGGFDSPTV | |
| | AYSVLVVAKVEKGKSKKLKSVKELLGITIMERSSFEKNPI | |
| | DFLEAKGYKEVKKDLIIKLPKYSLFELENGRKRMLASAG | |
| | ELQKGNELALPSKYVNFLYLASHYEKLKGSPEDNEQKQL | |
| | FVEQHKHYLDEIIEQISEFSKRVILADANLDKVLSAYNKH | |
| | RDKPIREQAENIIHLFTLTNLGAPAAFKYFDTTIDRKRYT | |
| | STKEVLDATLIHQSITGLYETRIDLSQLGGD | |

[0316] The prime editors described herein may include any of the above SpCas9 sequences, or any variant thereof having at least 80%, at least 85%, at least 90%, at least 95%, or at least 99% sequence identity thereto.

[0317] B. Wild Type Cas9 Orthologs

[0318] In other embodiments, the Cas9 protein can be a wild type Cas9 ortholog from another bacterial species different from the canonical Cas9 from S. pyogenes. For example, the following Cas9 orthologs can be used in connection with the prime editor constructs described in this specification. In addition, any variant Cas9 orthologs having at least 80%, at least 85%, at least 90%, at least 95%, or at least 99% sequence identity to any of the below orthologs may also be used with the present prime editors.

| Description | Sequence |
|---|---|
| LfCas9 | MKEYHIGLDIGTSSIGWAVTDSQFKLMRIKGKTAIGVRLFEEGKTAAERR |
| Lactobacillus | TFRTTRRRLKRRKWRLHYLDEIFAPHLQEVDENFLRRLKQSNIHPEDPTK |
| fermentum | NQAFIGKLLFPDLLKKNERGYPTLIKMRDELPVEQRAHYPVMNIYKLRE |
| wild type | AMINEDRQFDLREVYLAVHHIVKYRGHFLNNASVDKFKVGRIDFDKSFN |
| GenBank: | VLNEAYEELQNGEGSFTIEPSKVEKIGQLLLDTKMRKLDRQKAVAKLLE |
| SNX31424.11 | VKVADKEETKRNKQIATAMSKLVLGYKADFATVAMANGNEWKIDLSS |
| | ETSEDEIEKFREELSDAQNDILTEITSLFSQIMLNEIVPNGMSISESMMDRY |
| | WTHERQLAEVKEYLATQPASARKEFDQVYNKYIGQAPKERGFDLEKGL |
| | KKILSKKENWKEIDELLKAGDFLPKQRTSANGVIPHQMHQQELDRIIEKQ |
| | AKYYPWLATENPATGERDRHQAKYELDQLVSFRIPYYVGPLVTPEVQK |
| | ATSGAKFAWAKRKEDGEITPWNLWDKIDRAESAEAFIKRMTVKDTYLL |
| | NEDVLPANSLLYQKYNVLNELNNVRVNGRRLSVGIKQDIYTELFKKKKT |
| | VKASDVASLVMAKTRGVNKPSVEGLSDPKKFNSNLATYLDLKSIVGDK |
| | VDDNRYQTDLENIIEWRSVFEDGEIFADKLTEVEWLTDEQRSALVKKRY |
| | KGWGRLSKKLLTGIVDENGQRIIDLMWNTDQNFKEIVDQPVFKEQIDQL |
| | NQKAITNDGMTLRERVESVLDDAYTSPQNKKAIWQVVRVVEDIVKAVG |
| | NAPKSISIEFARNEGNKGEITRSRRTQLQKLFEDQAHELVKDTSLTEELEK |
| | APDLSDRYYFYFTQGGKDMYTGDPINFDEISTKYDIDHILPQSFVKDNSL |
| | DNRVLTSRKENNKKSDQVPAKLYAAKMKPYWNQLLKQGLITQRKFEN |
| | LTKDVDQNIKYRSLGFVKRQLVETRQVIKLTANILGSMYQEAGTEIIETR |
| | AGLTKQLREEFDLPKVREVNDYHHAVDAYLTTFAGQYLNRRYPKLRSF |
| | FVYGEYMKFKHGSDLKLRNFNFFHELMEGDKSQGKVVDQQTGELITTR |
| | DEVAKSFDRLLNMKYMLVSKEVHDRSDQLYGATIVTAKESGKLTSPIEI |
| | KKNRLVDLYGAYTNGTSAFMTIIKFTGNKPKYKVIGIPTTSAASLKRAGK |
| | PGSESYNQELHRIIKSNPKVKKGFEIVVPHVSYGQLIVDGDCKFTLASPTV |
| | QHPATQLVLSKKSLETISSGYKILKDKPAIANERLIRVFDEVVGQMNRYF |
| | TIFDQRSNRQKVADARDKFLSLPTESKYEGAKKVQVGKTEVITNLLMGL |
| | HANATQGDLKVLGLATFGFFQSTTGLSLSEDTMIVYQSPTGLFERRICLK |
| | DI (SEQ ID NO: 26) |
| SaCas9 | MDKKYSIGLDIGTNSVGWAVITDEYKVPSKKFKVLGNTDRHSIKKNLIG |
| Staphylococcus | ALLFDSGETAEATRLKRTARRRYTRRKNRICYLQEIFSNEMAKVDDSFFH |
| aureus | RLEESFLVEEDKKHERHPIFGNIVDEVAYHEKYPTIYHLRKKLVDSTDKA |
| wild type | DLRLIYLALAHMIKFRGHFLIEGDLNPDNSDVDKLFIQLVQTYNQLFEEN |
| GenBank: | PINASGVDAKAILSARLSKSRRLENLIAQLPGEKKNGLFGNLIALSLGLTP |
| AYD60528.1 | NFKSNFDLAEDAKLQLSKDTYDDDLDNLLAQIGDQYADLFLAAKNLSD |
| | AILLSDILRVNTEITKAPLSASMIKRYDEHHQDLTLLKALVRQQLPEKYK |
| | EIFFDQSKNGYAGYIDGGASQEEFYKFIKPILEKMDGTEELLVKLNREDL |
| | LRKQRTFDNGSIPHQIHLGELHAILRRQEDFYPFLKDNREKIEKILTFRIPY |
| | YVGPLARGNSRFAWMTRKSEETITPWNFEEVVDKGASAQSFIERMTNFD |
| | KNLPNEKVLPKHSLLYEYFTVYNELTKVKYVTEGMRKPAFLSGEQKKAI |
| | VDLLFKTNRKVTVKQLKEDYFKKIECFDSVEISGVEDRFNASLGTYHDL |
| | LKIIKDKDFLDNEENEDILEDIVLTLTLFEDREMIEERLKTYAHLFDDKVM |
| | KQLKRRRYTGWGRLSRKLINGIRDKQSGKTILDFLKSDGFANRNFMQLI |
| | HDDSLTFKEDIQKAQVSGQGDSLHEHIANLAGSPAIKKGILQTVKVVDEL |
| | VKVMGRHKPENIVIEMARENQTTQKGQKNSRERMKRIEEGIKELGSQIL |
| | KEHPVENTQLQNEKLYLYYLQNGRDMYVDQELDINRLSDYDVDHIVPQ |
| | SFLKDDSIDNKVLTRSDKNRGKSDNVPSEEVVKKMKNYWRQLLNAKLI |
| | TQRKFDNLTKAERGGLSELDKAGFIKRQLVETRQITKHVAQILDSRMNT |
| | KYDENDKLIREVKVITLKSKLVSDFRKDFQFYKVREINNYHHAHDAYLN |
| | AVVGTALIKKYPKLESEFVYGDYKVYDVRKMIAKSEQEIGKATAKYFFY |
| | SNIMNFFKTEITLANGEIRKRPLIETNGETGEIVWDKGRDFATVRKVLSM |
| | PQVNIVKKTEVQTGGFSKESILPKRNSDKLIARKKDWDPKKYGGFDSPT |
| | VAYSVLVVAKVEKGKSKKLKSVKELLGITIMERSSFEKNPIDFLEAKGYK |
| | EVKKDLIIKLPKYSLFELENGRKRMLASAGELQKGNELALPSKYVNFLY |
| | LASHYEKLKGSPEDNEQKQLFVEQHKHYLDEIIEQISEFSKRVILADANL |
| | DKVLSAYNKHRDKPIREQAENIIHLFTLTNLGAPAAFKYFDTTIDRKRYT |
| | STKEVLDATLIHQSITGLYETRIDLSQLGGD (SEQ ID NO: 27) |
| SaCas9 | MGKRNYILGLDIGITSVGYGIIDYETRDVIDAGVRLFKEANVENNEGRRS |
| Staphylococcus | KRGARRLKRRRRHRIQRVKKLLFDYNLLTDHSELSGINPYEARVKGLSQ |
| aureus | KLSEEEFSAALLHLAKRRGVHNVNEVEEDTGNELSTKEQISRNSKALEE |
| | KYVAELQLERLKKDGEVRGSINRFKTSDYVKEAKQLLKVQKAYHQLDQ |
| | SFIDTYIDLLETRRTYYEGPGEGSPFGWKDIKEWYEMLMGHCTYFPEELR |
| | SVKYAYNADLYNALNDLNNLVITRDENEKLEYYEKFQIIENVFKQKKKP |
| | TLKQIAKEILVNEEDIKGYRVTSTGKPEFTNLKVYHDIKDITARKEIIENA |
| | ELLDQIAKILTIYQSSEDIQEELTNLNSELTQEEIEQISNLKGYTGTHNLSL |
| | KAINLILDELWHTNDNQIAIFNRLKLVPKKVDLSQQKEIPTTLVDDFILSP |
| | VVKRSFIQSIKVINAIIKKYGLPNDIIIELAREKNSKDAQKMINEMQKRNR |
| | QTNERIEEIIRTTGKENAKYLIEKIKLHDMQEGKCLYSLEAIPLEDLLNNP |
| | FNYEVDHIIPRSVSFDNSFNNKVLVKQEENSKKGNRTPFQYLSSSDSKISY |
| | ETFKKHILNLAKGKGRISKTKKEYLLEERDINRFSVQKDFINRNLVDTRY |
| | ATRGLMNLLRSYFRVNNLDVKVKSINGGFTSFLRRKWKFKKERNKGYK |
| | HHAEDALIIANADFIFKEWKKLDKAKKVMENQMFEEKQAESMPEIETEQ |
| | EYKEIFITPHQIKHIKDFKDYKYSHRVDKKPNRKLINDTLYSTRKDDKGN |
| | TLIVNNLNGLYDKDNDKLKKLINKSPEKLLMYHHDPQTYQKLKLIMEQ |
| | YGDEKNPLYKYYEETGNYLTKYSKKDNGPVIKKIKYYGNKLNAHLDIT |
| | DDYPNSRNKVVKLSLKPYRFDVYLDNGVYKFVTVKNLDVIKKENYYEV |
| | NSKCYEEAKKLKKISNQAEFIASFYKNDLIKINGELYRVIGVNNDLLNRIE |
| | VNMIDITYREYLENMNDKRPPHIIKTIASKTQSIKKYSTDILGNLYEVKSK |
| | KHPQIIKK (SEQ ID NO: 28) |
| StCas9 | MLFNKCIIISINLDFSNKEKCMTKPYSIGLDIGTNSVGWAVITDNYKVPSK |
| Streptococcus | KMKVLGNTSKKYIKKNLLGVLLFDSGITAEGRRLKRTARRRYTRRRNRI |
| thermophilus | LYLQEIFSTEMATLDDAFFQRLDDSFLVPDDKRDSKYPIFGNLVEEKVYH |
| UniProtKB/ | DEFPTIYHLRKYLADSTKKADLRLVYLALAHMIKYRGHFLIEGEFNSKN |
| Swiss-Prot: | NDIQKNFQDFLDTYNAIFESDLSLENSKQLEEIVKDKISKLEKKDRILKLF |
| G3ECR1.2 | PGEKNSGIFSEFLKLIVGNQADFRKCFNLDEKASLHFSKESYDEDLETLL |
| Wild type | GYIGDDYSDVFLKAKKLYDAILLSGFLTVTDNETEAPLSSAMIKRYNEH |
| | KEDLALLKEYIRNISLKTYNEVFKDDTKNGYAGYIDGKTNQEDFYVYLK |
| | NLLAEFEGADYFLEKIDREDFLRKQRTFDNGSIPYQIHLQEMRAILDKQA |
| | KFYPFLAKNKERIEKILTFRIPYYVGPLARGNSDFAWSIRKRNEKITPWNF |
| | EDVIDKESSAEAFINRMTSFDLYLPEEKVLPKHSLLYETFNVYNELTKVR |
| | FIAESMRDYQFLDSKQKKDIVRLYFKDKRKVTDKDIIEYLHAIYGYDGIE |
| | LKGIEKQFNSSLSTYHDLLNIINDKEFLDDSSNEAIIEEIIHTLTIFEDREMIK |
| | QRLSKFENIFDKSVLKKLSRRHYTGWGKLSAKLINGIRDEKSGNTILDYLI |
| | DDGISNRNFMQLIHDDALSFKKKIQKAQIIGDEDKGNIKEVVKSLPGSPAI |
| | KKGILQSIKIVDELVKVMGGRKPESIVVEMARENQYTNQGKSNSQQRLK |
| | RLEKSLKELGSKILKENIPAKLSKIDNNALQNDRLYLYYLQNGKDMYTG |
| | DDLDIDRLSNYDIDHIIPQAFLKDNSIDNKVLVSSASNRGKSDDFPSLEVV |
| | KKRKTFWYQLLKSKLISQRKFDNLTKAERGGLLPEDKAGFIQRQLVETR |
| | QITKHVARLLDEKFNNKKDENNRAVRTVKIITLKSTLVSQFRKDFELYK |
| | VREINDFHHAHDAYLNAVIASALLKKYPKLEPEFVYGDYPKYNSFRERK |
| | SATEKVYFYSNIMNIFKKSISLADGRVIERPLIEVNEETGESVWNKESDLA |
| | TVRRVLSYPQVNVVKKVEEQNHGLDRGKPKGLFNANLSSKPKPNSNEN |
| | LVGAKEYLDPKKYGGYAGISNSFAVLVKGTIEKGAKKKITNVLEFQGISI |
| | LDRINYRKDKLNFLLEKGYKDIELIIELPKYSLFELSDGSRRMLASILSTN |
| | NKRGEIHKGNQIFLSQKFVKLLYHAKRISNTINENHRKYVENHKKEFEEL |
| | FYYILEFNENYVGAKKNGKLLNSAFQSWQNHSIDELCSSFIGPTGSERKG |
| | LFELTSRGSAADFEFLGVKIPRYRDYTPSSLLKDATLIHQSVTGLYETRID |
| | LAKLGEG (SEQ ID NO: 29) |
| LcCas9 | MKIKNYNLALTPSTSAVGHVEVDDDLNILEPVHHQKAIGVAKFGEGETA |
| Lactobacillus | EARRLARSARRTTKRRANRINHYFNEIMKPEIDKVDPLMFDRIKQAGLSP |
| crispatus | LDERKEFRTVIFDRPNIASYYHNQFPTIWHLQKYLMITDEKADIRLIYWA |
| NCBI | LHSLLKHRGHFFNTTPMSQFKPGKLNLKDDMLALDDYNDLEGLSFAVA |
| Reference | NSPEIEKVIKDRSMHKKEKIAELKKLIVNDVPDKDLAKRNNKIITQIVNAI |
| Sequence: | MGNSFHLNFIFDMDLDKLTSKAWSFKLDDPELDTKFDAISGSMTDNQIGI |
| WP_133478044.1 | FETLQKIYSAISLLDILNGSSNVVDAKNALYDKHKRDLNLYFKFLNTLPD |
| Wild type | EIAKTLKAGYTLYIGNRKKDLLAARKLLKVNVAKNFSQDDFYKLINKEL |
| | KSIDKQGLQTRFSEKVGELVAQNNFLPVQRSSDNVFIPYQLNAITFNKILE |
| | NQGKYYDFLVKPNPAKKDRKNAPYELSQLMQFTIPYYVGPLVTPEEQV |
| | KSGIPKTSRFAWMVRKDNGAITPWNFYDKVDIEATADKFIKRSIAKDSY |
| | LLSELVLPKHSLLYEKYEVFNELSNVSLDGKKLSGGVKQILFNEVFKKTN |
| | KVNTSRILKALAKHNIPGSKITGLSNPEEFTSSLQTYNAWKKYFPNQIDNF |
| | AYQQDLEKMIEWSTVFEDHKILAKKLDEIEWLDDDQKKFVANTRLRGW |
| | GRLSKRLLTGLKDNYGKSIMQRLETTKANFQQIVYKPEFREQIDKISQAA |
| | AKNQSLEDILANSYTSPSNRKAIRKTMSVVDEYIKLNHGKEPDKIFLMFQ |
| | RSEQEKGKQTEARSKQLNRILSQLKADKSANKLFSKQLADEFSNAIKKS |
| | KYKLNDKQYFYFQQLGRDALTGEVIDYDELYKYTVLHIIPRSKLTDDSQ |
| | NNKVLTKYKIVDGSVALKFGNSYSDALGMPIKAFWTELNRLKLIPKGKL |
| | LNLTTDFSTLNKYQRDGYIARQLVETQQIVKLLATIMQSRFKHTKIIEVR |
| | NSQVANIRYQFDYFRIKNLNEYYRGFDAYLAAVVGTYLYKVYPKARRL |
| | FVYGQYLKPKKTNQENQDMHLDSEKKSQGFNFLWNLLYGKQDQIFVN |
| | GTDVIAFNRKDLITKMNTVYNYKSQKISLAIDYHNGAMFKATLFPRNDR |
| | DTAKTRKLIPKKKDYDTDIYGGYTSNVDGYMLLAEIIKRDGNKQYGFYG |
| | VPSRLVSELDTLKKTRYTEYEEKLKEIIKPELGVDLKKIKKIKILKNKVPF |
| | NQVIIDKGSKFFITSTSYRWNYRQLILSAESQQTLMDLVVDPDFSNHKAR |
| | KDARKNADERLIKVYEEILYQVKNYMPMFVELHRCYEKLVDAQKTFKS |
| | LKISDKAMVLNQILILLHSNATSPVLEKLGYHTRFTLGKKHNLISENAVL |
| | VTQSITGLKENHVSIKQML (SEQ ID NO: 30) |
| PdCas9 | MTNEKYSIGLDIGTSSIGFAVVNDNNRVIRVKGKNAIGVRLFDEGKAAA |
| Pedicoccus | DRRSFRTTRRSFRTTRRRLSRRRWRLKLLREIFDAYITPVDEAFFIRLKES |
| damnnosus | NLSPKDSKKQYSGDILFNDRSDKDFYEKYPTIYHLRNALMTEHRKFDVR |
| NCBI | EIYLAIHHIMKFRGHFLNATPANNFKVGRLNLEEKFEELNDIYQRVFPDE |
| Reference | SIEFRTDNLEQIKEVLLDNKRSRADRQRTLVSDIYQSSEDKDIEKRNKAV |
| Sequence: | ATEILKASLGNKAKLNVITNVEVDKEAAKEWSITFDSESIDDDLAKIEGQ |
| WP_062913273.1 | MTDDGHEIIEVLRSLYSGITLSAIVPENHTLSQSMVAKYDLHKDHLKLFK |
| Wild type | KLINGMTDTKKAKNLRAAYDGYIDGVKGKVLPQEDFYKQVQVNLDDS |
| | AEANEIQTYIDQDIFMPKQRTKANGSIPHQLQQQELDQIIENQKAYYPWL |
| | AELNPNPDKKRQQLAKYKLDELVTFRVPYYVGPMITAKDQKNQSGAEF |
| | AWMIRKEPGNITPWNFDQKVDRMATANQFIKRMTTTDTYLLGEDVLPA |
| | QSLLYQKFEVLNELNKIRIDHKPISIEQKQQIFNDLFKQFKNVTIKHLQDY |
| | LVSQGQYSKRPLIEGLADEKRFNSSLSTYSDLCGIFGAKLVEENDRQEDL |
| | EKIIEWSTIFEDKKIYRAKLNDLTWLTDDQKEKLATKRYQGWGRLSRKL |
| | LVGLKNSEHRNIMDILWITNENFMQIQAEPDFAKLVTDANKGMLEKTDS |
| | QDVINDLYTSPQNKKAIRQILLVVHDIQNAMHGQAPAKIHVEFARGEER |
| | NPRRSVQRQRQVEAAYEKVSNELVSAKVRQEFKEAINNKRDFKDRLFL |
| | YFMQGGIDIYTGKQLNIDQLSSYQIDHILPQAFVKDDSLTNRVLTNENQV |
| | KADSVPIDIFGKKMLSVWGRMKDQGLISKGKYRNLTMNPENISAHTENG |
| | FINRQLVETRQVIKLAVNILADEYGDSTQIISVKADLSHQMREDFELLKN |
| | RDVNDYHHAFDAYLAAFIGNYLLKRYPKLESYFVYGDFKKFTQKETKM |
| | RRFNFIYDLKHCDQVVNKETGEILWTKDEDIKYIRHLFAYKKILVSHEVR |
| | EKRGALYNQTIYKAKDDKGSGQESKKLIRIKDDKETKIYGGYSGKSLAY |
| | MTIVQITKKNKVSYRVIGIPTLALARLNKLENDSTENNGELYKIIKPQFTH |
| | YKVDKKNGEIIETTDDFKIVVSKVRFQQLIDDAGQFFMLASDTYKNNAQ |
| | QLVISNNALKAINNTNITDCPRDDLERLDNLRLDSAFDEIVKKMDKYFSA |
| | YDANNFREKIRNSNLIFYQLPVEDQWENNKITELGKRTVLTRILQGLHAN |
| | ATTTDMSIFKIKTPFGQLRQRSGISLSENAQLIYQSPTGLFERRVQLNKIK |
| | (SEQ ID NO: 31) |
| FnCas9 | MKKQKFSDYYLGFDIGTNSVGWCVTDLDYNVLRFNKKDMWGSRLFEE |
| Fusobaterium | AKTAAERRVQRNSRRRLKRRKWRLNLLEEIFSNEILKIDSNFFRRLKESSL |
| nucleatum | WLEDKSSKEKFTLFNDDNYKDYDFYKQYPTIFHLRNELIKNPEKKDIRLV |
| NCBI | YLAIHSIFKSRGHFLFEGQNLKEIKNFETLYNNLIAFLEDNGINKIIDKNNI |
| Reference | EKLEKIVCDSKKGLKDKEKEFKEIFNSDKQLVAIFKLSVGSSVSLNDLFD |
| Sequence: | TDEYKKGEVEKEKISFREQIYEDDKPIYYSILGEKIELLDIAKTFYDFMVL |
| WP_060798984.1 | NNILADSQYISEAKVKLYEEHKKDLKNLKYIIRKYNKGNYDKLFKDKNE |
| | NNYSAYIGLNKEKSKKEVIEKSRLKIDDLIKNIKGYLPKVEEIEEKDKAIF |
| | NKILNKIELKTILPKQRISDNGTLPYQIHEAELEKILENQSKYYDFLNYEE |
| | NGIITKDKLLMTFKFRIPYYVGPLNSYHKDKGGNSWIVRKEEGKILPWNF |
| | EQKVDIEKSAEEFIKRMTNKCTYLNGEDVIPKDTFLYSEYVILNELNKVQ |
| | VNDEFLNEENKRKIIDELFKENKKVSEKKFKEYLLVKQIVDGTIELKGVK |
| | DSFNSNYISYIRFKDIFGEKLNLDIYKEISEKSILWKCLYGDDKKIFEKKIK |
| | NEYGDILTKDEIKKINTFKFNNWGRLSEKLLTGIEFINLETGECYSSVMDA |
| | LRRTNYNLMELLSSKFTLQESINNENKEMNEASYRDLIEESYVSPSLKRAI |
| | FQTLKIYEEIRKITGRVPKKVFIEMARGGDESMKNKKIPARQEQLKKLYD |
| | SCGNDIANFSIDIKEMKNSLISYDNNSLRQKKLYLYYLQFGKCMYTGREI |
| | DLDRLLQNNDTYDIDHIYPRSKVIKDDSFDNLVLVLKNENAEKSNEYPV |
| | KKEIQEKMKSFWRFLKEKNFISDEKYKRLTGKDDFELRGFMARQLVNV |
| | RQTTKEVGKILQQIEPEIKIVYSKAEIASSFREMFDFIKVRELNDTHHAKD |
| | AYLNIVAGNVYNTKFTEKPYRYLQEIKENYDVKKIYNYDIKNAWDKEN |
| | SLEIVKKNMEKNTVNITRFIKEKKGQLFDLNPIKKGETSNEIISIKPKVYN |
| | GKDDKLNEKYGYYKSLNPAYFLYVEHKEKNKRIKSFERVNLVDVNNIK |
| | DEKSLVKYLIENKKLVEPRVIKKVYKRQVILINDYPYSIVTLDSNKLMDF |
| | ENLKPLFLENKYEKILKNVIKFLEDNQGKSEENYKFIYLKKKDRYEKNET |
| | LESVKDRYNLEFNEMYDKFLEKLDSKDYKNYMNNKKYQELLDVKEKFI |
| | KLNLFDKAFTLKSFLDLFNRKTMADFSKVGLTKYLGKIQKISSNVLSKNE |
| | LYLLEESVTGLFVKKIKL (SEQ ID NO: 32) |
| EcCas9 | RRKQRIQILQELLGEEVLKTDPGFFHRMKESRYVVEDKRTLDGKQVELP |
| Enterococcus | YALFVDKDYTDKEYYKQFPTINHLIVYLMTTSDTPDIRLVYLALHYYMK |
| cecorum | NRGNFLHSGDINNVKDINDILEQLDNVLETFLDGWNLKLKSYVEDIKNIY |
| NCBI | NRDLGRGERKKAFVNTLGAKTKAEKAFCSLISGGSTNLAELFDDSSLKEI |
| Reference | ETPKIEFASSSLEDKIDGIQEALEDRFAVIEAAKRLYDWKTLTDILGDSSS |
| Sequence: | LAEARVNSYQMHHEQLLELKSLVKEYLDRKVFQEVFVSLNVANNYPAY |
| WP_047338501.1 | IGHTKINGKKKELEVKRTKRNDFYSYVKKQVIEPIKKKVSDEAVLTKLSE |
| Wild type | IESLIEVDKYLPLQVNSDNGVIPYQVKLNELTRIFDNLENRIPVLRENRDK |
| | IIKTFKFRIPYYVGSLNGVVKNGKCTNWMVRKEEGKIYPWNFEDKVDLE |
| | ASAEQFIRRMTNKCTYLVNEDVLPKYSLLYSKYLVLSELNNLRIDGRPLD |
| | VKIKQDIYENVFKKNRKVTLKKIKKYLLKEGIITDDDELSGLADDVKSSL |
| | TAYRDFKEKLGHLDLSEAQMENIILNITLFGDDKKLLKKRLAALYPFIDD |
| | KSLNRIATLNYRDWGRLSERFLSGITSVDQETGELRTIIQCMYETQANLM |
| | QLLAEPYHFVEAIEKENPKVDLESISYRIVNDLYVSPAVKRQIWQTLLVIK |
| | DIKQVMKHDPERIFIEMAREKQESKKTKSRKQVLSEVYKKAKEYEHLFE |
| | KLNSLTEEQLRSKKIYLYFTQLGKCMYSGEPIDFENLVSANSNYDIDHIYP |
| | QSKTIDDSFNNIVLVKKSLNAYKSNHYPIDKNIRDNEKVKTLWNTLVSK |
| | GLITKEKYERLIRSTPFSDEELAGFIARQLVETRQSTKAVAEILSNWFPESE |
| | IVYSKAKNVSNFRQDFEILKVRELNDCHHAHDAYLNIVVGNAYHTKFTN |
| | SPYRFIKNKANQEYNLRKLLQKVNKIESNGVVAWVGQSENNPGTIATVK |
| | KVIRRNTVLISRMVKEVDGQLFDLTLMKKGKGQVPIKSSDERLTDISKY |
| | GGYNKATGAYFTFVKSKKRGKVVRSFEYVPLHLSKQFENNNELLKEYIE |
| | KDRGLTDVEILIPKVLINSLFRYNGSLVRITGRGDTRLLLVHEQPLYVSNS |
| | FVQQLKSVSSYKLKKSENDNAKLTKTATEKLSNIDELYDGLLRKLDLPIY |
| | SYWFSSIKEYLVESRTKYIKLSIEEKALVIFEILHLFQSDAQVPNLKILGLS |
| | TKPSRIRIQKNLKDTDKMSIIHQSPSGIFEHEIELTSL (SEQ ID NO: 33) |
| AhCas9 | MQNGFLGITVSSEQVGWAVTNPKYELERASRKDLWGVRLFDKAETAED |
| Anaerostipes | RRMFRTNRRLNQRKKNRIHYLRDIFHEEVNQKDPNFFQQLDESNFCEDD |
| hadrus | RTVEFNFDTNLYKNQFPTVYHLRKYLMETKDKPDIRLVYLAFSKFMKN |
| NCBI | RGHFLYKGNLGEVMDFENSMKGFCESLEKFNIDFPTLSDEQVKEVRDIL |
| Reference | CDHKIAKTVKKKNIITITKVKSKTAKAWIGLFCGCSVPVKVLFQDIDEEIV |
| Sequence: | TDPEKISFEDASYDDYIANIEKGVGIYYEAIVSAKMLFDWSILNEILGDHQ |
| WP_044924278.1 | LLSDAMIAEYNKHHDDLKRLQKIIKGTGSRELYQDIFINDVSGNYVCYV |
| Wild type | GHAKTMSSADQKQFYTFLKNRLKNVNGISSEDAEWIDTEIKNGTLLPKQ |
| | TKRDNSVIPHQLQLREFELILDNMQEMYPFLKENREKLLKIFNFVIPYYV |
| | GPLKGVVRKGESTNWMVPKKDGVIHPWNFDEMVDKEASAECFISRMT |
| | GNCSYLFNEKVLPKNSLLYETFEVLNELNPLKINGEPISVELKQRIYEQLF |
| | LTGKKVTKKSLTKYLIKNGYDKDIELSGIDNEFHSNLKSHIDFEDYDNLS |
| | DEEVEQIILRITVFEDKQLLKDYLNREFVKLSEDERKQICSLSYKGWGNL |
| | SEMLLNGITVTDSNGVEVSVMDMLWNTNLNLMQILSKKYGYKAEIEHY |
| | NKEHEKTIYNREDLMDYLNIPPAQRRKVNQLITIVKSLKKTYGVPNKIFF |
| | KISREHQDDPKRTSSRKEQLKYLYKSLKSEDEKHLMKELDELNDHELSN |
| | DKVYLYFLQKGRCIYSGKKLNLSRLRKSNYQNDIDYIYPLSAVNDRSMN |
| | NKVLTGIQENRADKYTYFPVDSEIQKKMKGFWMELVLQGFMTKEKYFR |
| | LSRENDFSKSELVSFIEREISDNQQSGRMIASVLQYYFPESKIVFVKEKLIS |
| | SFKRDFHLISSYGHNHLQAAKDAYITIVVGNVYHTKFTMDPAIYFKNHK |
| | RKDYDLNRLFLENISRDGQIAWESGPYGSIQTVRKEYAQNHIAVTKRVV |
| | EVKGGLFKQMPLKKGHGEYPLKTNDPRFGNIAQYGGYTNVTGSYFVLV |
| | ESMEKGKKRISLEYVPVYLHERLEDDPGHKLLKEYLVDHRKLNHPKILL |
| | AKVRKNSLLKIDGFYYRLNGRSGNALILTNAVELIMDDWQTKTANKISG |
| | YMKRRAIDKKARVYQNEFHIQELEQLYDFYLDKLKNGVYKNRKNNQA |
| | ELIHNEKEQFMELKTEDQCVLLTEIKKLFVCSPMQADLTLIGGSKHTGMI |
| | AMSSNVTKADFAVIAEDPLGLRNKVIYSHKGEK (SEQ ID NO: 34) |
| KvCas9 | MSQNNNKIYNIGLDIGDASVGWAVVDEHYNLLKRHGKHMWGSRLFTQ |
| Kandleria | ANTAVERRSSRSTRRRYNKRRERIRLLREIMEDMVLDVDPTFFIRLANVS |
| vitulina | FLDQEDKKDYLKENYHSNYNLFIDKDFNDKTYYDKYPTIYHLRKHLCES |
| NCBI | KEKEDPRLIYLALHHIVKYRGNFLYEGQKFSMDVSNIEDKMIDVLRQFN |
| Reference | EINLFEYVEDRKKIDEVLNVLKEPLSKKHKAEKAFALFDTTKDNKAAYK |
| Sequence: | ELCAALAGNKFNVTKMLKEAELHDEDEKDISFKFSDATFDDAFVEKQPL |
| WP_031589969.1 | LGDCVEFIDLLHDIYSWVELQNILGSAHTSEPSISAAMIQRYEDHKNDLK |
| Wild type | LLKDVIRKYLPKKYFEVFRDEKSKKNNYCNYINHPSKTPVDEFYKYIKK |
| | LIEKIDDPDVKTILNKIELESFMLKQNSRTNGAVPYQMQLDELNKILENQ |
| | SVYYSDLKDNEDKIRSILTFRIPYYFGPLNITKDRQFDWIIKKEGKENERIL |
| | PWNANEIVDVDKTADEFIKRMRNFCTYFPDEPVMAKNSLTVSKYEVLN |
| | EINKLRINDHLIKRDMKDKMLHTLFMDHKSISANAMKKWLVKNQYFSN |
| | TDDIKIEGFQKENACSTSLTPWIDFTKIFGKINESNYDFIEKIIYDVTVFED |
| | KKILRRRLKKEYDLDEEKIKKILKLKYSGWSRLSKKLLSGIKTKYKDSTR |
| | TPETVLEVMERTNMNLMQVINDEKLGFKKTIDDANSTSVSGKFSYAEVQ |
| | ELAGSPAIKRGIWQALLIVDEIKKIMKHEPAHVYIEFARNEDEKERKDSF |
| | VNQMLKLYKDYDFEDETEKEANKHLKGEDAKSKIRSERLKLYYTQMG |
| | KCMYTGKSLDIDRLDTYQVDHIVPQSLLKDDSIDNKVLVLSSENQRKLD |
| | DLVIPSSIRNKMYGFWEKLFNNKIISPKKFYSLIKTEFNEKDQERFINRQIV |
| | ETRQITKHVAQIIDNHYENTKVVTVRADLSHQFRERYHIYKNRDINDFHH |
| | AHDAYIATILGTYIGHRFESLDAKYIYGEYKRIFRNQKNKGKEMKKNND |
| | GFILNSMRNIYADKDTGEIVWDPNYIDRIKKCFYYKDCFVTKKLEENNG |
| | TFFNVTVLPNDTNSDKDNTLATVPVNKYRSNVNKYGGFSGVNSFIVAIK |
| | GKKKKGKKVIEVNKLTGIPLMYKNADEEIKINYLKQAEDLEEVQIGKEIL |
| | KNQLIEKDGGLYYIVAPTEIINAKQLILNESQTKLVCEIYKAMKYKNYDN |
| | LDSEKIIDLYRLLINKMELYYPEYRKQLVKKFEDRYEQLKVISIEEKCNII |
| | KQILATLHCNSSIGKIMYSDFKISTTIGRLNGRTISLDDISFIAESPTGMYSK |
| | KYKL (SEQ ID NO: 35) |
| EfCas9 | MRLFEEGHTAEDRRLKRTARRRISRRRNRLRYLQAFFEEAMTDLDENFF |
| Enterococcus | ARLQESFLVPEDKKWHRHPIFAKLEDEVAYHETYPTIYHLRKKLADSSE |
| faecalis | QADLRLIYLALAHIVKYRGHFLIEGKLSTENTSVKDQFQQFMVIYNQTFV |
| NCBI | NGESRLVSAPLPESVLIEEELTEKASRTKKSEKVLQQFPQEKANGLFGQF |
| Reference | LKLMVGNKADFKKVFGLEEEAKITYASESYEEDLEGILAKVGDEYSDVF |
| Sequence: | LAAKNVYDAVELSTILADSDKKSHAKLSSSMIVRFTEHQEDLKKFKRFIR |
| WP_016631044.1 | ENCPDEYDNLFKNEQKDGYAGYIAHAGKVSQLKFYQYVKKIIQDIAGAE |
| Wild type | YFLEKIAQENFLRKQRTFDNGVIPHQIHLAELQAIIHRQAAYYPFLKENQE |
| | KIEQLVTFRIPYYVGPLSKGDASTFAWLKRQSEEPIRPWNLQETVDLDQS |
| | ATAFIERMTNFDTYLPSEKVLPKHSLLYEKFMVFNELTKISYTDDRGIKA |
| | NFSGKEKEKIFDYLFKTRRKVKKKDIIQFYRNEYNTEIVTLSGLEEDQFN |
| | ASFSTYQDLLKCGLTRAELDHPDNAEKLEDIIKILTIFEDRQRIRTQLSTFK |
| | GQFSAEVLKKLERKHYTGWGRLSKKLINGIYDKESGKTILDYLVKDDGV |
| | SKHYNRNFMQLINDSQLSFKNAIQKAQSSEHEETLSETVNELAGSPAIKK |
| | GIYQSLKIVDELVAIMGYAPKRIVVEMARENQTTSTGKRRSIQRLKIVEK |
| | AMAEIGSNLLKEQPTTNEQLRDTRLFLYYMQNGKDMYTGDELSLHRLS |
| | HYDIDHIIPQSFMKDDSLDNLVLVGSTENRGKSDDVPSKEVVKDMKAY |
| | WEKLYAAGLISQRKFQRLTKGEQGGLTLEDKAHFIQRQLVETRQITKNV |
| | AGILDQRYNAKSKEKKVQIITLKASLTSQFRSIFGLYKVREVNDYHHGQD |
| | AYLNCVVATTLLKVYPNLAPEFVYGEYPKFQTFKENKATAKAIIYTNLL |
| | RFFTEDEPRFTKDGEILWSNSYLKTIKKELNYHQMNIVKKVEVQKGGFS |
| | KESIKPKGPSNKLIPVKNGLDPQKYGGFDSPVVAYTVLFTHEKGKKPLIK |
| | QEILGITIMEKTRFEQNPILFLEEKGFLRPRVLMKLPKYTLYEFPEGRRRL |
| | LASAKEAQKGNQMVLPEHLLTLLYHAKQCLLPNQSESLAYVEQHQPEF |
| | QEILERVVDFAEVHTLAKSKVQQIVKLFEANQTADVKEIAASFIQLMQFN |
| | AMGAPSTFKFFQKDIERARYTSIKEIFDATIIYQSPTGLYETRRKVVD |
| | (SEQ ID NO: 36) |
| Staphylococcus | KRNYILGLDIGITSVGYGIIDYETRDVIDAGVRLFKEANVENNEGRRSKR |
| aureus | GARRLKRRRRHRIQRVKKLLFDYNLLTDHSELSGINPYEARVKGLSQKL |
| Cas9 | SEEEFSAALLHLAKRRGVHNVNEVEEDTGNELSTKEQISRNSKALEEKY |
| | VAELQLERLKKDGEVRGSINRFKTSDYVKEAKQLLKVQKAYHQLDQSFI |
| | DTYIDLLETRRTYYEGPGEGSPFGWKDIKEWYEMLMGHCTYFPEELRSV |
| | KYAYNADLYNALNDLNNLVITRDENEKLEYYEKFQIIENVFKQKKKPTL |
| | KQIAKEILVNEEDIKGYRVTSTGKPEFTNLKVYHDIKDITARKEIIENAEL |
| | LDQIAKILTIYQSSEDIQEELTNLNSELTQEEIEQISNLKGYTGTHNLSLKAI |
| | NLILDELWHTNDNQIAIFNRLKLVPKKVDLSQQKEIPTTLVDDFILSPVVK |
| | RSFIQSIKVINAIIKKYGLPNDIIIELAREKNSKDAQKMINEMQKRNRQTN |
| | ERIEEIIRTTGKENAKYLIEKIKLHDMQEGKCLYSLEAIPLEDLLNNPFNY |
| | EVDHIIPRSVSFDNSFNNKVLVKQEENSKKGNRTPFQYLSSSDSKISYETF |
| | KKHILNLAKGKGRISKTKKEYLLEERDINRFSVQKDFINRNLVDTRYATR |
| | GLMNLLRSYFRVNNLDVKVKSINGGFTSFLRRKWKFKKERNKGYKHHA |
| | EDALIIANADFIFKEWKKLDKAKKVMENQMFEEKQAESMPEIETEQEYK |
| | EIFITPHQIKHIKDFKDYKYSHRVDKKPNRELINDTLYSTRKDDKGNTLIV |
| | NNLNGLYDKDNDKLKKLINKSPEKLLMYHHDPQTYQKLKLIMEQYGDE |
| | KNPLYKYYEETGNYLTKYSKKDNGPVIKKIKYYGNKLNAHLDITDDYP |
| | NSRNKVVKLSLKPYRFDVYLDNGVYKFVTVKNLDVIKKENYYEVNSKC |
| | YEEAKKLKKISNQAEFIASFYNNDLIKINGELYRVIGVNNDLLNRIEVNMI |
| | DITYREYLENMNDKRPPRIIKTIASKTQSIKKYSTDILGNLYEVKSKKHPQ |
| | IIKKG (SEQ ID NO: 37) |
| Geobacillus | MKYKIGLDIGITSIGWAVINLDIPRIEDLGVRIFDRAENPKTGESLALPRRL |
| thermodenitrificans | ARSARRRLRRRKHRLERIRRLFVREGILTKEELNKLFEKKHEIDVWQLRV |
| Cas9 | EALDRKLNNDELARILLHLAKRRGFRSNRKSERTNKENSTMLKHIEENQ |
| | SILSSYRTVAEMVVKDPKFSLHKRNKEDNYTNTVARDDLEREIKLIFAKQ |
| | REYGNIVCTEAFEHEYISIWASQRPFASKDDIEKKVGFCTFEPKEKRAPK |
| | ATYTFQSFTVWEHINKLRLVSPGGIRALTDDERRLIYKQAFHKNKITFHD |
| | VRTLLNLPDDTRFKGLLYDRNTTLKENEKVRFLELGAYHKIRKAIDSVY |
| | GKGAAKSFRPIDFDTFGYALTMFKDDTDIRSYLRNEYEQNGKRMENLA |
| | DKVYDEELIEELLNLSFSKFGHLSLKALRNILPYMEQGEVYSTACERAGY |
| | TFTGPKKKQKTVLLPNIPPIANPVVMRALTQARKVVNAIIKKYGSPVSIHI |
| | ELARELSQSFDERRKMQKEQEGNRKKNETAIRQLVEYGLTLNPTGLDIV |
| | KFKLWSEQNGKCAYSLQPIEIERLLEPGYTEVDHVIPYSRSLDDSYTNKV |
| | LVLTKENREKGNRTPAEYLGLGSERWQQFETFVLTNKQFSKKKRDRLLR |
| | LHYDENEENEFKNRNLNDTRYISRFLANFIREHLKFADSDDKQKVYTVN |
| | GRITAHLRSRWNFNKNREESNLHHAVDAAIVACTTPSDIARVTAFYQRR |
| | EQNKELSKKTDPQFPQPWPHFADELQARLSKNPKESIKALNLGNYDNEK |
| | LESLQPVFVSRMPKRSITGAAHQETLRRYIGIDERSGKIQTVVKKKLSEIQ |
| | LDKTGHFPMYGKESDPRTYEAIRQRLLEHNNDPKKAFQEPLYKPKKNGE |
| | LGPIIRTIKIIDTTNQVIPLNDGKTVAYNSNIVRVDVFEKDGKYYCVPIYTI |
| | DMMKGILPNKAIEPNKPYSEWKEMTEDYTFRFSLYPNDLIRIEFPREKTIK |
| | TAVGEEIKIKDLFAYYQTIDSSNGGLSLVSHDNNFSLRSIGSRTLKRFEKY |
| | QVDVLGNIYKVRGEKRVGVASSSHSKAGETIRPL (SEQ ID NO: 38) |
| ScCas9 | MEKKYSIGLDIGTNSVGWAVITDDYKVPSKKFKVLGNTNRKSIKKNLM |
| S. canis | GALLFDSGETAEATRLKRTARRRYTRRKNRIRYLQEIFANEMAKLDDSF |
| 1375 AA | FQRLEESFLVEEDKKNERHPIFGNLADEVAYHRNYPTIYHLRKKLADSPE |
| 159.2 kDa | KADLRLIYLALAHIIKFRGHFLIEGKLNAENSDVAKLFYQLIQTYNQLFEE |
| | SPLDEIEVDAKGILSARLSKSKRLEKLIAVFPNEKKNGLFGNIIALALGLTP |
| | NFKSNFDLTEDAKLQLSKDTYDDDLDELLGQIGDQYADLFSAAKNLSDA |
| | ILLSDILRSNSEVTKAPLSASMVKRYDEHHQDLALLKTLVRQQFPEKYAE |
| | IFKDDTKNGYAGYVGIGIKHRKRTTKLATQEEFYKFIKPILEKMDGAEEL |
| | LAKLNRDDLLRKQRTFDNGSIPHQIHLKELHAILRRQEEFYPFLKENREKI |
| | EKILTFRIPYYVGPLARGNSRFAWLTRKSEEAITPWNFEEVVDKGASAQS |
| | FIERMTNFDEQLPNKKVLPKHSLLYEYFTVYNELTKVKYVTERMRKPEF |
| | LSGEQKKAIVDLLFKTNRKVTVKQLKEDYFKKIECFDSVEIIGVEDRFNA |
| | SLGTYHDLLKIIKDKDFLDNEENEDILEDIVLTLTLFEDREMIEERLKTYA |
| | HLFDDKVMKQLKRRHYTGWGRLSRKMINGIRDKQSGKTILDFLKSDGF |
| | SNRNFMQLIHDDSLTFKEEIEKAQVSGQGDSLHEQIADLAGSPAIKKGIL |
| | QTVKIVDELVKVMGHKPENIVIEMARENQTTTKGLQQSRERKKRIEEGIK |
| | ELESQILKENPVENTQLQNEKLYLYYLQNGRDMYVDQELDINRLSDYDV |
| | DHIVPQSFIKDDSIDNKVLTRSVENRGKSDNVPSEEVVKKMKNYWRQLL |
| | NAKLITQRKFDNLTKAERGGLSEADKAGFIKRQLVETRQITKHVARILDS |
| | RMNTKRDKNDKPIREVKVITLKSKLVSDFRKDFQLYKVRDINNYHHAH |
| | DAYLNAVVGTALIKKYPKLESEFVYGDYKVYDVRKMIAKSEQEIGKAT |
| | AKRFFYSNIMNFFKTEVKLANGEIRKRPLIETNGETGEVVWNKEKDFAT |
| | VRKVLAMPQVNIVKKTEVQTGGFSKESILSKRESAKLIPRKKGWDTRKY |
| | GGFGSPTVAYSILVVAKVEKGKAKKLKSVKVLVGITIMEKGSYEKDPIGF |
| | LEAKGYKDIKKELIFKLPKYSLFELENGRRRMLASATELQKANELVLPQ |
| | HLVRLLYYTQNISATTGSNNLGYIEQHREEFKEIFEKIIDFSEKYILKNKV |
| | NSNLKSSFDEQFAVSDSILLSNSFVSLLKYTSFGASGGFTFLDLDVKQGRL |
| | RYQTVTEVLDATLIYQSITGLYETRTDLSQLGGD (SEQ ID NO: 39) |

[0319] The prime editors described herein may include any of the above Cas9 ortholog sequences, or any variants thereof having at least 80%, at least 85%, at least 90%, at least 95%, or at least 99% sequence identity thereto.

[0320] The napDNAbp may include any suitable homologs and/or orthologs or naturally occurring enzymes, such as, Cas9. Cas9 homologs and/or orthologs have been described in various species, including, but not limited to, S. pyogenes and S. thermophilus. Preferably, the Cas moiety is configured (e.g, mutagenized, recombinantly engineered, or otherwise obtained from nature) as a nickase, i.e., capable of cleaving only a single strand of the target doubpdditional suitable Cas9 nucleases and sequences will be apparent to those of skill in the art based on this disclosure, and such Cas9 nucleases and sequences include Cas9 sequences from the organisms and loci disclosed in Chylinski, Rhun, and Charpentier, “The tracrRNA and Cas9 families of type II CRISPR-Cas immunity systems” (2013) RNA Biology 10:5, 726-737; the entire contents of which are incorporated herein by reference. In some embodiments, a Cas9 nuclease has an inactive (e.g., an inactivated) DNA cleavage domain, that is, the Cas9 is a nickase. In some embodiments, the Cas9 protein comprises an amino acid sequence that is at least 80% identical to the amino acid sequence of a Cas9 protein as provided by any one of the variants of Table 3. In some embodiments, the Cas9 protein comprises an amino acid sequence that is at least 85%, at least 90%, at least 92%, at least 95%, at least 96%, at least 97%, at least 98%, at least 99%, or at least 99.5% identical to the amino acid sequence of a Cas9 protein as provided by any one of the Cas9 orthologs in the above tables.

[0321] C. Dead Cas9 Variant

[0322] In certain embodiments, the prime editors described herein may include a dead Cas9, e.g., dead SpCas9, which has no nuclease activity due to one or more mutations that inactive both nuclease domains of Cas9, namely the RuvC domain (which cleaves the non-protospacer DNA strand) and HNH domain (which cleaves the protospacer DNA strand). The nuclease inactivation may be due to one or mutations that result in one or more substitutions and/or deletions in the amino acid sequence of the encoded protein, or any variants thereof having at least 80%, at least 85%, at least 90%, at least 95%, or at least 99% sequence identity thereto.

[0323] As used herein, the term “dCas9” refers to a nuclease-inactive Cas9 or nuclease-dead Cas9, or a functional fragment thereof, and embraces any naturally occurring dCas9 from any organism, any naturally-occurring dCas9 equivalent or functional fragment thereof, any dCas9 homolog, ortholog, or paralog from any organism, and any mutant or variant of a dCas9, naturally-occurring or engineered. The term dCas9 is not meant to be particularly limiting and may be referred to as a “dCas9 or equivalent.” Exemplary dCas9 proteins and method for making dCas9 proteins are further described herein and/or are described in the art and are incorporated herein by reference.

[0324] In other embodiments, dCas9 corresponds to, or comprises in part or in whole, a Cas9 amino acid sequence having one or more mutations that inactivate the Cas9 nuclease activity. In other embodiments, Cas9 variants having mutations other than D10A and H840A are provided which may result in the full or partial inactivate of the endogeneous Cas9 nuclease activity (e.g., nCas9 or dCas9, respectively). Such mutations, by way of example, include other amino acid substitutions at D10 and H820, or other substitutions within the nuclease domains of Cas9 (e.g., substitutions in the HNH nuclease subdomain and/or the RuvC1 subdomain) with reference to a wild type sequence such as Cas9 from Streptococcus pyogenes (NCBI Reference Sequence: NC_017053.1). In some embodiments, variants or homologues of Cas9 (e.g., variants of Cas9 from Streptococcus pyogenes (NCBI Reference Sequence: NC_017053.1 (SEQ ID NO: 20))) are provided which are at least about 70% identical, at least about 80% identical, at least about 90% identical, at least about 95% identical, at least about 98% identical, at least about 99% identical, at least about 99.5% identical, or at least about 99.9% identical to NCBI Reference Sequence: NC_017053.1. In some embodiments, variants of dCas9 (e.g., variants of NCBI Reference Sequence: NC_017053.1 (SEQ ID NO: 20)) are provided having amino acid sequences which are shorter, or longer than NC_017053.1 (SEQ ID NO: 20) by about 5 amino acids, by about 10 amino acids, by about 15 amino acids, by about 20 amino acids, by about 25 amino acids, by about 30 amino acids, by about 40 amino acids, by about 50 amino acids, by about 75 amino acids, by about 100 amino acids or more.

[0325] In one embodiment, the dead Cas9 may be based on the canonical SpCas9 sequence of Q99ZW2 and may have the following sequence, which comprises a D10X and an H810X, wherein X may be any amino acid, substitutions (underlined and bolded), or a variant be variant of SEQ ID NO: 40 having at least 80%, at least 85%, at least 90%, at least 95%, or at least 99% sequence identity thereto.

[0326] In one embodiment, the dead Cas9 may be based on the canonical SpCas9 sequence of Q99ZW2 and may have the following sequence, which comprises a D10A and an H81A substitutions (underlined and bolded), or be a variant of SEQ ID NO: 41 having at least 80%, at least 85%, at least 90%, at least 95%, or at least 99% sequence identity thereto.

| Description | Sequence | SEQ ID NO: |
|---|---|---|
| dead Cas9 or | MDKKYSIGLXIGTNSVGWAVITDEYKVPSKKFKVLGNTD | SEQ ID NO: |
| dCas9 | RHSIKKNLIGALLFDSGETAEATRLKRTARRRYTRRKNRI | 40 |
| Streptococcus | CYLQEIFSNEMAKVDDSFFHRLEESFLVEEDKKHERHPIF | |
| pyogenes | GNIVDEVAYHEKYPTIYHLRKKLVDSTDKADLRLIYLAL | |
| Q99ZW2 | AHMIKFRGHFLIEGDLNPDNSDVDKLFIQLVQTYNQLFEE | |
| Cas9 with | NPINASGVDAKAILSARLSKSRRLENLIAQLPGEKKNGLF | |
| D10X and | GNLIALSLGLTPNFKSNFDLAEDAKLQLSKDTYDDDLDN | |
| H810X | LLAQIGDQYADLFLAAKNLSDAILLSDILRVNTEITKAPLS | |
| Where “X” is | ASMIKRYDEHHQDLTLLKALVRQQLPEKYKEIFFDQSKN | |
| any amino | GYAGYIDGGASQEEFYKFIKPILEKMDGTEELLVKLNRE | |
| acid | DLLRKQRTFDNGSIPHQIHLGELHAILRRQEDFYPFLKDN | |
| | REKIEKILTFRIPYYVGPLARGNSRFAWMTRKSEETITPW | |
| | NFEEVVDKGASAQSFIERMTNFDKNLPNEKVLPKHSLLY | |
| | EYFTVYNELTKVKYVTEGMRKPAFLSGEQKKAIVDLLFK | |
| | TNRKVTVKQLKEDYFKKIECFDSVEISGVEDRFNASLGT | |
| | YHDLLKIIKDKDFLDNEENEDILEDIVLTLTLFEDREMIEE | |
| | RLKTYAHLFDDKVMKQLKRRRYTGWGRLSRKLINGIRD | |
| | KQSGKTILDFLKSDGFANRNFMQLIHDDSLTFKEDIQKAQ | |
| | VSGQGDSLHEHIANLAGSPAIKKGILQTVKVVDELVKVM | |
| | GRHKPENIVIEMARENQTTQKGQKNSRERMKRIEEGIKE | |
| | LGSQILKEHPVENTQLQNEKLYLYYLQNGRDMYVDQEL | |
| | DINRLSDYDVDXIVPQSFLKDDSIDNKVLTRSDKNRGKS | |
| | DNVPSEEVVKKMKNYWRQLLNAKLITQRKFDNLTKAER | |
| | GGLSELDKAGFIKRQLVETRQITKHVAQILDSRMNTKYD | |
| | ENDKLIREVKVITLKSKLVSDFRKDFQFYKVREINNYHH | |
| | AHDAYLNAVVGTALIKKYPKLESEFVYGDYKVYDVRK | |
| | MIAKSEQEIGKATAKYFFYSNIMNFFKTEITLANGEIRKRP | |
| | LIETNGETGEIVWDKGRDFATVRKVLSMPQVNIVKKTEV | |
| | QTGGFSKESILPKRNSDKLIARKKDWDPKKYGGFDSPTV | |
| | AYSVLVVAKVEKGKSKKLKSVKELLGITIMERSSFEKNPI | |
| | DFLEAKGYKEVKKDLIIKLPKYSLFELENGRKRMLASAG | |
| | ELQKGNELALPSKYVNFLYLASHYEKLKGSPEDNEQKQL | |
| | FVEQHKHYLDEIIEQISEFSKRVILADANLDKVLSAYNKH | |
| | RDKPIREQAENIIHLFTLTNLGAPAAFKYFDTTIDRKRYTS | |
| | TKEVLDATLIHQSITGLYETRIDLSQLGGD | |
| dead Cas9 or | MDKKYSIGLAIGTNSVGWAVITDEYKVPSKKFKVLGNTD | SEQ ID NO: |
| dCas9 | RHSIKKNLIGALLFDSGETAEATRLKRTARRRYTRRKNRI | 41 |
| Streptococcus | CYLQEIFSNEMAKVDDSFFHRLEESFLVEEDKKHERHPIF | |
| pyogenes | GNIVDEVAYHEKYPTIYHLRKKLVDSTDKADLRLIYLAL | |
| Q99ZW2 | AHMIKFRGHFLIEGDLNPDNSDVDKLFIQLVQTYNQLFEE | |
| Cas9 with | NPINASGVDAKAILSARLSKSRRLENLIAQLPGEKKNGLF | |
| D10A and | GNLIALSLGLTPNFKSNFDLAEDAKLQLSKDTYDDDLDN | |
| H810A | LLAQIGDQYADLFLAAKNLSDAILLSDILRVNTEITKAPLS | |
| | ASMIKRYDEHHQDLTLLKALVRQQLPEKYKEIFFDQSKN | |
| | GYAGYIDGGASQEEFYKFIKPILEKMDGTEELLVKLNRE | |
| | DLLRKQRTFDNGSIPHQIHLGELHAILRRQEDFYPFLKDN | |
| | REKIEKILTFRIPYYVGPLARGNSRFAWMTRKSEETITPW | |
| | NFEEVVDKGASAQSFIERMTNFDKNLPNEKVLPKHSLLY | |
| | EYFTVYNELTKVKYVTEGMRKPAFLSGEQKKAIVDLLFK | |
| | TNRKVTVKQLKEDYFKKIECFDSVEISGVEDRFNASLGT | |
| | YHDLLKIIKDKDFLDNEENEDILEDIVLTLTLFEDREMIEE | |
| | RLKTYAHLFDDKVMKQLKRRRYTGWGRLSRKLINGIRD | |
| | KQSGKTILDFLKSDGFANRNFMQLIHDDSLTFKEDIQKAQ | |
| | VSGQGDSLHEHIANLAGSPAIKKGILQTVKVVDELVKVM | |
| | GRHKPENIVIEMARENQTTQKGQKNSRERMKRIEEGIKE | |
| | LGSQILKEHPVENTQLQNEKLYLYYLQNGRDMYVDQEL | |
| | DINRLSDYDVDAIVPQSFLKDDSIDNKVLTRSDKNRGKS | |
| | DNVPSEEVVKKMKNYWRQLLNAKLITQRKFDNLTKAER | |
| | GGLSELDKAGFIKRQLVETRQITKHVAQILDSRMNTKYD | |
| | ENDKLIREVKVITLKSKLVSDFRKDFQFYKVREINNYHH | |
| | AHDAYLNAVVGTALIKKYPKLESEFVYGDYKVYDVRK | |
| | MIAKSEQEIGKATAKYFFYSNIMNFFKTEITLANGEIRKRP | |
| | LIETNGETGEIVWDKGRDFATVRKVLSMPQVNIVKKTEV | |
| | QTGGFSKESILPKRNSDKLIARKKDWDPKKYGGFDSPTV | |
| | AYSVLVVAKVEKGKSKKLKSVKELLGITIMERSSFEKNPI | |
| | DFLEAKGYKEVKKDLIIKLPKYSLFELENGRKRMLASAG | |
| | ELQKGNELALPSKYVNFLYLASHYEKLKGSPEDNEQKQL | |
| | FVEQHKHYLDEIIEQISEFSKRVILADANLDKVLSAYNKH | |
| | RDKPIREQAENIIHLFTLTNLGAPAAFKYFDTTIDRKRYTS | |
| | TKEVLDATLIHQSITGLYETRIDLSQLGGD | |

[0327] D. Cas9 Nickase Variant

[0328] In one embodiment, the prime editors described herein comprise a Cas9 nickase. The term “Cas9 nickase” of “nCas9” refers to a variant of Cas9 which is capable of introducing a single-strand break in a double strand DNA molecule target. In some embodiments, the Cas9 nickase comprises only a single functioning nuclease domain. The wild type Cas9 (e.g., the canonical SpCas9) comprises two separate nuclease domains, namely, the RuvC domain (which cleaves the non-protospacer DNA strand) and HNH domain (which cleaves the protospacer DNA strand). In one embodiment, the Cas9 nickase comprises a mutation in the RuvC domain which inactivates the RuvC nuclease activity. For example, mutations in aspartate (D) 10, histidine (H) 983, aspartate (D) 986, or glutamate (E) 762, have been reported as loss-of-function mutations of the RuvC nuclease domain and the creation of a functional Cas9 nickase (e.g., Nishimasu et al., “Crystal structure of Cas9 in complex with guide RNA and target DNA,” Cell 156(5), 935-949, which is incorporated herein by reference). Thus, nickase mutations in the RuvC domain could include D10X, H983X, D986X, or E762X, wherein X is any amino acid other than the wild type amino acid. In certain embodiments, the nickase could be D1A, of H983A, or D986A, or E762A, or a combination thereof.

[0329] In various embodiments, the Cas9 nickase can having a mutation in the RuvC nuclease domain and have one of the following amino acid sequences, or a variant thereof having an amino acid sequence that has at least 80%, at least 85%, at least 90%, at least 95%, or at least 99% sequence identity thereto.

| Description | Sequence | SEQ ID NO: |
|---|---|---|
| Cas9 nickase | MDKKYSIGLXIGTNSVGWAVITDEYKVPSKKFKVLGNTD | SEQ ID NO: |
| Streptococcus | RHSIKKNLIGALLFDSGETAEATRLKRTARRRYTRRKNRI | 42 |
| pyogenes | CYLQEIFSNEMAKVDDSFFHRLEESFLVEEDKKHERHPIF | |
| Q99ZW2 | GNIVDEVAYHEKYPTIYHLRKKLVDSTDKADLRLIYLAL | |
| Cas9 with | AHMIKFRGHFLIEGDLNPDNSDVDKLFIQLVQTYNQLFEE | |
| D10X, | NPINASGVDAKAILSARLSKSRRLENLIAQLPGEKKNGLF | |
| wherein X is | GNLIALSLGLTPNFKSNFDLAEDAKLQLSKDTYDDDLDN | |
| any alternate | LLAQIGDQYADLFLAAKNLSDAILLSDILRVNTEITKAPLS | |
| amino acid | ASMIKRYDEHHQDLTLLKALVRQQLPEKYKEIFFDQSKN | |
| | GYAGYIDGGASQEEFYKFIKPILEKMDGTEELLVKLNRE | |
| | DLLRKQRTFDNGSIPHQIHLGELHAILRRQEDFYPFLKDN | |
| | REKIEKILTFRIPYYVGPLARGNSRFAWMTRKSEETITPW | |
| | NFEEVVDKGASAQSFIERMTNFDKNLPNEKVLPKHSLLY | |
| | EYFTVYNELTKVKYVTEGMRKPAFLSGEQKKAIVDLLFK | |
| | TNRKVTVKQLKEDYFKKIECFDSVEISGVEDRFNASLGT | |
| | YHDLLKIIKDKDFLDNEENEDILEDIVLTLTLFEDREMIEE | |
| | RLKTYAHLFDDKVMKQLKRRRYTGWGRLSRKLINGIRD | |
| | KQSGKTILDFLKSDGFANRNFMQLIHDDSLTFKEDIQKAQ | |
| | VSGQGDSLHEHIANLAGSPAIKKGILQTVKVVDELVKVM | |
| | GRHKPENIVIEMARENQTTQKGQKNSRERMKRIEEGIKE | |
| | LGSQILKEHPVENTQLQNEKLYLYYLQNGRDMYVDQEL | |
| | DINRLSDYDVDHIVPQSFLKDDSIDNKVLTRSDKNRGKS | |
| | DNVPSEEVVKKMKNYWRQLLNAKLITQRKFDNLTKAER | |
| | GGLSELDKAGFIKRQLVETRQITKHVAQILDSRMNTKYD | |
| | ENDKLIREVKVITLKSKLVSDFRKDFQFYKVREINNYHH | |
| | AHDAYLNAVVGTALIKKYPKLESEFVYGDYKVYDVRK | |
| | MIAKSEQEIGKATAKYFFYSNIMNFFKTEITLANGEIRKRP | |
| | LIETNGETGEIVWDKGRDFATVRKVLSMPQVNIVKKTEV | |
| | QTGGFSKESILPKRNSDKLIARKKDWDPKKYGGFDSPTV | |
| | AYSVLVVAKVEKGKSKKLKSVKELLGITIMERSSFEKNPI | |
| | DFLEAKGYKEVKKDLIIKLPKYSLFELENGRKRMLASAG | |
| | ELQKGNELALPSKYVNFLYLASHYEKLKGSPEDNEQKQL | |
| | FVEQHKHYLDEIIEQISEFSKRVILADANLDKVLSAYNKH | |
| | RDKPIREQAENIIHLFTLTNLGAPAAFKYFDTTIDRKRYTS | |
| | TKEVLDATLIHQSITGLYETRIDLSQLGGD | |
| Cas9 nickase | MDKKYSIGLDIGTNSVGWAVITDEYKVPSKKFKVLGNTD | SEQ ID NO: |
| Streptococcus | RHSIKKNLIGALLFDSGETAEATRLKRTARRRYTRRKNRI | 43 |
| pyogenes | CYLQEIFSNEMAKVDDSFFHRLEESFLVEEDKKHERHPIF | |
| Q99ZW2 | GNIVDEVAYHEKYPTIYHLRKKLVDSTDKADLRLIYLAL | |
| Cas9 with | AHMIKFRGHFLIEGDLNPDNSDVDKLFIQLVQTYNQLFEE | |
| E762X, | NPINASGVDAKAILSARLSKSRRLENLIAQLPGEKKNGLF | |
| wherein X is | GNLIALSLGLTPNFKSNFDLAEDAKLQLSKDTYDDDLDN | |
| any alternate | LLAQIGDQYADLFLAAKNLSDAILLSDILRVNTEITKAPLS | |
| amino acid | ASMIKRYDEHHQDLTLLKALVRQQLPEKYKEIFFDQSKN | |
| | GYAGYIDGGASQEEFYKFIKPILEKMDGTEELLVKLNRE | |
| | DLLRKQRTFDNGSIPHQIHLGELHAILRRQEDFYPFLKDN | |
| | REKIEKILTFRIPYYVGPLARGNSRFAWMTRKSEETITPW | |
| | NFEEVVDKGASAQSFIERMTNFDKNLPNEKVLPKHSLLY | |
| | EYFTVYNELTKVKYVTEGMRKPAFLSGEQKKAIVDLLFK | |
| | TNRKVTVKQLKEDYFKKIECFDSVEISGVEDRFNASLGT | |
| | YHDLLKIIKDKDFLDNEENEDILEDIVLTLTLFEDREMIEE | |
| | RLKTYAHLFDDKVMKQLKRRRYTGWGRLSRKLINGIRD | |
| | KQSGKTILDFLKSDGFANRNFMQLIHDDSLTFKEDIQKAQ | |
| | VSGQGDSLHEHIANLAGSPAIKKGILQTVKVVDELVKVM | |
| | GRHKPENIVIXMARENQTTQKGQKNSRERMKRIEEGIKE | |
| | LGSQILKEHPVENTQLQNEKLYLYYLQNGRDMYVDQEL | |
| | DINRLSDYDVDHIVPQSFLKDDSIDNKVLTRSDKNRGKS | |
| | DNVPSEEVVKKMKNYWRQLLNAKLITQRKFDNLTKAER | |
| | GGLSELDKAGFIKRQLVETRQITKHVAQILDSRMNTKYD | |
| | ENDKLIREVKVITLKSKLVSDFRKDFQFYKVREINNYHH | |
| | AHDAYLNAVVGTALIKKYPKLESEFVYGDYKVYDVRK | |
| | MIAKSEQEIGKATAKYFFYSNIMNFFKTEITLANGEIRKRP | |
| | LIETNGETGEIVWDKGRDFATVRKVLSMPQVNIVKKTEV | |
| | QTGGFSKESILPKRNSDKLIARKKDWDPKKYGGFDSPTV | |
| | AYSVLVVAKVEKGKSKKLKSVKELLGITIMERSSFEKNPI | |
| | DFLEAKGYKEVKKDLIIKLPKYSLFELENGRKRMLASAG | |
| | ELQKGNELALPSKYVNFLYLASHYEKLKGSPEDNEQKQL | |
| | FVEQHKHYLDEIIEQISEFSKRVILADANLDKVLSAYNKH | |
| | RDKPIREQAENIIHLFTLTNLGAPAAFKYFDTTIDRKRYTS | |
| | TKEVLDATLIHQSITGLYETRIDLSQLGGD | |
| Cas9 nickase | MDKKYSIGLDIGTNSVGWAVITDEYKVPSKKFKVLGNTD | SEQ ID NO: |
| Streptococcus | RHSIKKNLIGALLFDSGETAEATRLKRTARRRYTRRKNRI | 44 |
| pyogenes | CYLQEIFSNEMAKVDDSFFHRLEESFLVEEDKKHERHPIF | |
| Q99ZW2 | GNIVDEVAYHEKYPTIYHLRKKLVDSTDKADLRLIYLAL | |
| Cas9 with | AHMIKFRGHFLIEGDLNPDNSDVDKLFIQLVQTYNQLFEE | |
| H983X, | NPINASGVDAKAILSARLSKSRRLENLIAQLPGEKKNGLF | |
| | GNLIALSLGLTPNFKSNFDLAEDAKLQLSKDTYDDDLDN | |
| | LLAQIGDQYADLFLAAKNLSDAILLSDILRVNTEITKAPLS | |
| | ASMIKRYDEHHQDLTLLKALVRQQLPEKYKEIFFDQSKN | |
| | GYAGYIDGGASQEEFYKFIKPILEKMDGTEELLVKLNRE | |
| | DLLRKQRTFDNGSIPHQIHLGELHAILRRQEDFYPFLKDN | |
| | REKIEKILTFRIPYYVGPLARGNSRFAWMTRKSEETITPW | |
| | NFEEVVDKGASAQSFIERMTNFDKNLPNEKVLPKHSLLY | |
| | EYFTVYNELTKVKYVTEGMRKPAFLSGEQKKAIVDLLFK | |
| | TNRKVTVKQLKEDYFKKIECFDSVEISGVEDRFNASLGT | |
| | YHDLLKIIKDKDFLDNEENEDILEDIVLTLTLFEDREMIEE | |
| | RLKTYAHLFDDKVMKQLKRRRYTGWGRLSRKLINGIRD | |
| | KQSGKTILDFLKSDGFANRNFMQLIHDDSLTFKEDIQKAQ | |
| | VSGQGDSLHEHIANLAGSPAIKKGILQTVKVVDELVKVM | |
| | GRHKPENIVIEMARENQTTQKGQKNSRERMKRIEEGIKE | |
| | LGSQILKEHPVENTQLQNEKLYLYYLQNGRDMYVDQEL | |
| | DINRLSDYDVDHIVPQSFLKDDSIDNKVLTRSDKNRGKS | |
| | DNVPSEEVVKKMKNYWRQLLNAKLITQRKFDNLTKAER | |
| | GGLSELDKAGFIKRQLVETRQITKHVAQILDSRMNTKYD | |
| | ENDKLIREVKVITLKSKLVSDFRKDFQFYKVREINNYHX | |
| | AHDAYLNAVVGTALIKKYPKLESEFVYGDYKVYDVRK | |
| | MIAKSEQEIGKATAKYFFYSNIMNFFKTEITLANGEIRKRP | |
| | LIETNGETGEIVWDKGRDFATVRKVLSMPQVNIVKKTEV | |
| | QTGGFSKESILPKRNSDKLIARKKDWDPKKYGGFDSPTV | |
| | AYSVLVVAKVEKGKSKKLKSVKELLGITIMERSSFEKNPI | |
| | DFLEAKGYKEVKKDLIIKLPKYSLFELENGRKRMLASAG | |
| | ELQKGNELALPSKYVNFLYLASHYEKLKGSPEDNEQKQL | |
| | FVEQHKHYLDEIIEQISEFSKRVILADANLDKVLSAYNKH | |
| | RDKPIREQAENIIHLFTLTNLGAPAAFKYFDTTIDRKRYTS | |
| | TKEVLDATLIHQSITGLYETRIDLSQLGGD | |
| Cas9 nickase | MDKKYSIGLDIGTNSVGWAVITDEYKVPSKKFKVLGNTD | SEQ ID NO: |
| Streptococcus | RHSIKKNLIGALLFDSGETAEATRLKRTARRRYTRRKNRI | 45 |
| pyogenes | CYLQEIFSNEMAKVDDSFFHRLEESFLVEEDKKHERHPIF | |
| Q99ZW2 | GNIVDEVAYHEKYPTIYHLRKKLVDSTDKADLRLIYLAL | |
| Cas9 with | AHMIKFRGHFLIEGDLNPDNSDVDKLFIQLVQTYNQLFEE | |
| D986X, | NPINASGVDAKAILSARLSKSRRLENLIAQLPGEKKNGLF | |
| wherein X is | GNLIALSLGLTPNFKSNFDLAEDAKLQLSKDTYDDDLDN | |
| any alternate | LLAQIGDQYADLFLAAKNLSDAILLSDILRVNTEITKAPLS | |
| amino acid | ASMIKRYDEHHQDLTLLKALVRQQLPEKYKEIFFDQSKN | |
| | GYAGYIDGGASQEEFYKFIKPILEKMDGTEELLVKLNRE | |
| | DLLRKQRTFDNGSIPHQIHLGELHAILRRQEDFYPFLKDN | |
| | REKIEKILTFRIPYYVGPLARGNSRFAWMTRKSEETITPW | |
| | NFEEVVDKGASAQSFIERMTNFDKNLPNEKVLPKHSLLY | |
| | EYFTVYNELTKVKYVTEGMRKPAFLSGEQKKAIVDLLFK | |
| | TNRKVTVKQLKEDYFKKIECFDSVEISGVEDRFNASLGT | |
| | YHDLLKIIKDKDFLDNEENEDILEDIVLTLTLFEDREMIEE | |
| | RLKTYAHLFDDKVMKQLKRRRYTGWGRLSRKLINGIRD | |
| | KQSGKTILDFLKSDGFANRNFMQLIHDDSLTFKEDIQKAQ | |
| | VSGQGDSLHEHIANLAGSPAIKKGILQTVKVVDELVKVM | |
| | GRHKPENIVIEMARENQTTQKGQKNSRERMKRIEEGIKE | |
| | LGSQILKEHPVENTQLQNEKLYLYYLQNGRDMYVDQEL | |
| | DINRLSDYDVDHIVPQSFLKDDSIDNKVLTRSDKNRGKS | |
| | DNVPSEEVVKKMKNYWRQLLNAKLITQRKFDNLTKAER | |
| | GGLSELDKAGFIKRQLVETRQITKHVAQILDSRMNTKYD | |
| | ENDKLIREVKVITLKSKLVSDFRKDFQFYKVREINNYHH | |
| | AHXAYLNAVVGTALIKKYPKLESEFVYGDYKVYDVRK | |
| | MIAKSEQEIGKATAKYFFYSNIMNFFKTEITLANGEIRKRP | |
| | LIETNGETGEIVWDKGRDFATVRKVLSMPQVNIVKKTEV | |
| | QTGGFSKESILPKRNSDKLIARKKDWDPKKYGGFDSPTV | |
| | AYSVLVVAKVEKGKSKKLKSVKELLGITIMERSSFEKNPI | |
| | DFLEAKGYKEVKKDLIIKLPKYSLFELENGRKRMLASAG | |
| | ELQKGNELALPSKYVNFLYLASHYEKLKGSPEDNEQKQL | |
| | FVEQHKHYLDEIIEQISEFSKRVILADANLDKVLSAYNKH | |
| | RDKPIREQAENIIHLFTLTNLGAPAAFKYFDTTIDRKRYTS | |
| | TKEVLDATLIHQSITGLYETRIDLSQLGGD | |
| Cas9 nickase | MDKKYSIGLAIGTNSVGWAVITDEYKVPSKKFKVLGNTD | SEQ ID NO: |
| Streptococcus | RHSIKKNLIGALLFDSGETAEATRLKRTARRRYTRRKNRI | 46 |
| pyogenes | CYLQEIFSNEMAKVDDSFFHRLEESFLVEEDKKHERHPIF | |
| Q99ZW2 | GNIVDEVAYHEKYPTIYHLRKKLVDSTDKADLRLIYLAL | |
| Cas9 with | AHMIKFRGHFLIEGDLNPDNSDVDKLFIQLVQTYNQLFEE | |
| D10A | NPINASGVDAKAILSARLSKSRRLENLIAQLPGEKKNGLF | |
| | GNLIALSLGLTPNFKSNFDLAEDAKLQLSKDTYDDDLDN | |
| | LLAQIGDQYADLFLAAKNLSDAILLSDILRVNTEITKAPLS | |
| | ASMIKRYDEHHQDLTLLKALVRQQLPEKYKEIFFDQS KN | |
| | GYAGYIDGGASQEEFYKFIKPILEKMDGTEELLVKLNRE | |
| | DLLRKQRTFDNGSIPHQIHLGELHAILRRQEDFYPFLKDN | |
| | REKIEKILTFRIPYYVGPLARGNSRFAWMTRKSEETITPW | |
| | NFEEVVDKGASAQSFIERMTNFDKNLPNEKVLPKHSLLY | |
| | EYFTVYNELTKVKYVTEGMRKPAFLSGEQKKAIVDLLFK | |
| | TNRKVTVKQLKEDYFKKIECFDSVEISGVEDRFNASLGT | |
| | YHDLLKIIKDKDFLDNEENEDILEDIVLTLTLFEDREMIEE | |
| | RLKTYAHLFDDKVMKQLKRRRYTGWGRLSRKLINGIRD | |
| | KQSGKTILDFLKSDGFANRNFMQLIHDDSLTFKEDIQKAQ | |
| | VSGQGDSLHEHIANLAGSPAIKKGILQTVKVVDELVKVM | |
| | GRHKPENIVIEMARENQTTQKGQKNSRERMKRIEEGIKE | |
| | LGSQILKEHPVENTQLQNEKLYLYYLQNGRDMYVDQEL | |
| | DINRLSDYDVDHIVPQSFLKDDSIDNKVLTRSDKNRGKS | |
| | DNVPSEEVVKKMKNYWRQLLNAKLITQRKFDNLTKAER | |
| | GGLSELDKAGFIKRQLVETRQITKHVAQILDSRMNTKYD | |
| | ENDKLIREVKVITLKSKLVSDFRKDFQFYKVREINNYHH | |
| | AHDAYLNAVVGTALIKKYPKLESEFVYGDYKVYDVRK | |
| | MIAKSEQEIGKATAKYFFYSNIMNFFKTEITLANGEIRKRP | |
| | LIETNGETGEIVWDKGRDFATVRKVLSMPQVNIVKKTEV | |
| | QTGGFSKESILPKRNSDKLIARKKDWDPKKYGGFDSPTV | |
| | AYSVLVVAKVEKGKSKKLKSVKELLGITIMERSSFEKNPI | |
| | DFLEAKGYKEVKKDLIIKLPKYSLFELENGRKRMLASAG | |
| | ELQKGNELALPSKYVNFLYLASHYEKLKGSPEDNEQKQL | |
| | FVEQHKHYLDEIIEQISEFSKRVILADANLDKVLSAYNKH | |
| | RDKPIREQAENIIHLFTLTNLGAPAAFKYFDTTIDRKRYTS | |
| | TKEVLDATLIHQSITGLYETRIDLSQLGGD | |
| Cas9 nickase | MDKKYSIGLDIGTNSVGWAVITDEYKVPSKKFKVLGNTD | SEQ ID NO: |
| Streptococcus | RHSIKKNLIGALLFDSGETAEATRLKRTARRRYTRRKNRI | 47 |
| pyogenes | CYLQEIFSNEMAKVDDSFFHRLEESFLVEEDKKHERHPIF | |
| Q99ZW2 | GNIVDEVAYHEKYPTIYHLRKKLVDSTDKADLRLIYLAL | |
| Cas9 with | AHMIKFRGHFLIEGDLNPDNSDVDKLFIQLVQTYNQLFEE | |
| E762A | NPINASGVDAKAILSARLSKSRRLENLIAQLPGEKKNGLF | |
| | GNLIALSLGLTPNFKSNFDLAEDAKLQLSKDTYDDDLDN | |
| | LLAQIGDQYADLFLAAKNLSDAILLSDILRVNTEITKAPLS | |
| | ASMIKRYDEHHQDLTLLKALVRQQLPEKYKEIFFDQSKN | |
| | GYAGYIDGGASQEEFYKFIKPILEKMDGTEELLVKLNRE | |
| | DLLRKQRTFDNGSIPHQIHLGELHAILRRQEDFYPFLKDN | |
| | REKIEKILTFRIPYYVGPLARGNSRFAWMTRKSEETITPW | |
| | NFEEVVDKGASAQSFIERMTNFDKNLPNEKVLPKHSLLY | |
| | EYFTVYNELTKVKYVTEGMRKPAFLSGEQKKAIVDLLFK | |
| | TNRKVTVKQLKEDYFKKIECFDSVEISGVEDRFNASLGT | |
| | YHDLLKIIKDKDFLDNEENEDILEDIVLTLTLFEDREMIEE | |
| | RLKTYAHLFDDKVMKQLKRRRYTGWGRLSRKLINGIRD | |
| | KQSGKTILDFLKSDGFANRNFMQLIHDDSLTFKEDIQKAQ | |
| | VSGQGDSLHEHIANLAGSPAIKKGILQTVKVVDELVKVM | |
| | GRHKPENIVIAMARENQTTQKGQKNSRERMKRIEEGIKE | |
| | LGSQILKEHPVENTQLQNEKLYLYYLQNGRDMYVDQEL | |
| | DINRLSDYDVDHIVPQSFLKDDSIDNKVLTRSDKNRGKS | |
| | DNVPSEEVVKKMKNYWRQLLNAKLITQRKFDNLTKAER | |
| | GGLSELDKAGFIKRQLVETRQITKHVAQILDSRMNTKYD | |
| | ENDKLIREVKVITLKSKLVSDFRKDFQFYKVREINNYHH | |
| | AHDAYLNAVVGTALIKKYPKLESEFVYGDYKVYDVRK | |
| | MIAKSEQEIGKATAKYFFYSNIMNFFKTEITLANGEIRKRP | |
| | LIETNGETGEIVWDKGRDFATVRKVLSMPQVNIVKKTEV | |
| | QTGGFSKESILPKRNSDKLIARKKDWDPKKYGGFDSPTV | |
| | AYSVLVVAKVEKGKSKKLKSVKELLGITIMERSSFEKNPI | |
| | DFLEAKGYKEVKKDLIIKLPKYSLFELENGRKRMLASAG | |
| | ELQKGNELALPSKYVNFLYLASHYEKLKGSPEDNEQKQL | |
| | FVEQHKHYLDEIIEQISEFSKRVILADANLDKVLSAYNKH | |
| | RDKPIREQAENIIHLFTLTNLGAPAAFKYFDTTIDRKRYTS | |
| | TKEVLDATLIHQSITGLYETRIDLSQLGGD | |
| Cas9 nickase | MDKKYSIGLDIGTNSVGWAVITDEYKVPSKKFKVLGNTD | SEQ ID NO: |
| Streptococcus | RHSIKKNLIGALLFDSGETAEATRLKRTARRRYTRRKNRI | 48 |
| pyogenes | CYLQEIFSNEMAKVDDSFFHRLEESFLVEEDKKHERHPIF | |
| Q99ZW2 | GNIVDEVAYHEKYPTIYHLRKKLVDSTDKADLRLIYLAL | |
| Cas9 with | AHMIKFRGHFLIEGDLNPDNSDVDKLFIQLVQTYNQLFEE | |
| H983A | NPINASGVDAKAILSARLSKSRRLENLIAQLPGEKKNGLF | |
| | GNLIALSLGLTPNFKSNFDLAEDAKLQLSKDTYDDDLDN | |
| | LLAQIGDQYADLFLAAKNLSDAILLSDILRVNTEITKAPLS | |
| | ASMIKRYDEHHQDLTLLKALVRQQLPEKYKEIFFDQSKN | |
| | GYAGYIDGGASQEEFYKFIKPILEKMDGTEELLVKLNRE | |
| | DLLRKQRTFDNGSIPHQIHLGELHAILRRQEDFYPFLKDN | |
| | REKIEKILTFRIPYYVGPLARGNSRFAWMTRKSEETITPW | |
| | NFEEVVDKGASAQSFIERMTNFDKNLPNEKVLPKHSLLY | |
| | EYFTVYNELTKVKYVTEGMRKPAFLSGEQKKAIVDLLFK | |
| | TNRKVTVKQLKEDYFKKIECFDSVEISGVEDRFNASLGT | |
| | YHDLLKIIKDKDFLDNEENEDILEDIVLTLTLFEDREMIEE | |
| | RLKTYAHLFDDKVMKQLKRRRYTGWGRLSRKLINGIRD | |
| | KQSGKTILDFLKSDGFANRNFMQLIHDDSLTFKEDIQKAQ | |
| | VSGQGDSLHEHIANLAGSPAIKKGILQTVKVVDELVKVM | |
| | GRHKPENIVIEMARENQTTQKGQKNSRERMKRIEEGIKE | |
| | LGSQILKEHPVENTQLQNEKLYLYYLQNGRDMYVDQEL | |
| | DINRLSDYDVDHIVPQSFLKDDSIDNKVLTRSDKNRGKS | |
| | DNVPSEEVVKKMKNYWRQLLNAKLITQRKFDNLTKAER | |
| | GGLSELDKAGFIKRQLVETRQITKHVAQILDSRMNTKYD | |
| | ENDKLIREVKVITLKSKLVSDFRKDFQFYKVREINNYHA | |
| | AHDAYLNAVVGTALIKKYPKLESEFVYGDYKVYDVRK | |
| | MIAKSEQEIGKATAKYFFYSNIMNFFKTEITLANGEIRKRP | |
| | LIETNGETGEIVWDKGRDFATVRKVLSMPQVNIVKKTEV | |
| | QTGGFSKESILPKRNSDKLIARKKDWDPKKYGGFDSPTV | |
| | AYSVLVVAKVEKGKSKKLKSVKELLGITIMERSSFEKNPI | |
| | DFLEAKGYKEVKKDLIIKLPKYSLFELENGRKRMLASAG | |
| | ELQKGNELALPSKYVNFLYLASHYEKLKGSPEDNEQKQL | |
| | FVEQHKHYLDEIIEQISEFSKRVILADANLDKVLSAYNKH | |
| | RDKPIREQAENIIHLFTLTNLGAPAAFKYFDTTIDRKRYTS | |
| | TKEVLDATLIHQSITGLYETRIDLSQLGGD | |
| Cas9 nickase | MDKKYSIGLDIGTNSVGWAVITDEYKVPSKKFKVLGNTD | SEQ ID NO: |
| Streptococcus | RHSIKKNLIGALLFDSGETAEATRLKRTARRRYTRRKNRI | 49 |
| pyogenes | CYLQEIFSNEMAKVDDSFFHRLEESFLVEEDKKHERHPIF | |
| Q99ZW2 | GNIVDEVAYHEKYPTIYHLRKKLVDSTDKADLRLIYLAL | |
| Cas 9 with | AHMIKFRGHFLIEGDLNPDNSDVDKLFIQLVQTYNQLFEE | |
| D986A | NPINASGVDAKAILSARLSKSRRLENLIAQLPGEKKNGLF | |
| | GNLIALSLGLTPNFKSNFDLAEDAKLQLSKDTYDDDLDN | |
| | LLAQIGDQYADLFLAAKNLSDAILLSDILRVNTEITKAPLS | |
| | ASMIKRYDEHHQDLTLLKALVRQQLPEKYKEIFFDQSKN | |
| | GYAGYIDGGASQEEFYKFIKPILEKMDGTEELLVKLNRE | |
| | DLLRKQRTFDNGSIPHQIHLGELHAILRRQEDFYPFLKDN | |
| | REKIEKILTFRIPYYVGPLARGNSRFAWMTRKSEETITPW | |
| | NFEEVVDKGASAQSFIERMTNFDKNLPNEKVLPKHSLLY | |
| | EYFTVYNELTKVKYVTEGMRKPAFLSGEQKKAIVDLLFK | |
| | TNRKVTVKQLKEDYFKKIECFDSVEISGVEDRFNASLGT | |
| | YHDLLKIIKDKDFLDNEENEDILEDIVLTLTLFEDREMIEE | |
| | RLKTYAHLFDDKVMKQLKRRRYTGWGRLSRKLINGIRD | |
| | KQSGKTILDFLKSDGFANRNFMQLIHDDSLTFKEDIQKAQ | |
| | VSGQGDSLHEHIANLAGSPAIKKGILQTVKVVDELVKVM | |
| | GRHKPENIVIEMARENQTTQKGQKNSRERMKRIEEGIKE | |
| | LGSQILKEHPVENTQLQNEKLYLYYLQNGRDMYVDQEL | |
| | DINRLSDYDVDHIVPQSFLKDDSIDNKVLTRSDKNRGKS | |
| | DNVPSEEVVKKMKNYWRQLLNAKLITQRKFDNLTKAER | |
| | GGLSELDKAGFIKRQLVETRQITKHVAQILDSRMNTKYD | |
| | ENDKLIREVKVITLKSKLVSDFRKDFQFYKVREINNYHH | |
| | AHAAYLNAVVGTALIKKYPKLESEFVYGDYKVYDVRK | |
| | MIAKSEQEIGKATAKYFFYSNIMNFFKTEITLANGEIRKRP | |
| | LIETNGETGEIVWDKGRDFATVRKVLSMPQVNIVKKTEV | |
| | QTGGFSKESILPKRNSDKLIARKKDWDPKKYGGFDSPTV | |
| | AYSVLVVAKVEKGKSKKLKSVKELLGITIMERSSFEKNPI | |
| | DFLEAKGYKEVKKDLIIKLPKYSLFELENGRKRMLASAG | |
| | ELQKGNELALPSKYVNFLYLASHYEKLKGSPEDNEQKQL | |
| | FVEQHKHYLDEIIEQISEFSKRVILADANLDKVLSAYNKH | |
| | RDKPIREQAENIIHLFTLTNLGAPAAFKYFDTTIDRKRYTS | |
| | TKEVLDATLIHQSITGLYETRIDLSQLGGD | |

[0330] In another embodiment, the Cas9 nickase comprises a mutation in the HNH domain which inactivates the HNH nuclease activity. For example, mutations in histidine (H) 840 or asparagine (R) 863 have been reported as loss-of-function mutations of the HNH nuclease domain and the creation of a functional Cas9 nickase (e.g., Nishimasu et al., “Crystal structure of Cas9 in complex with guide RNA and target DNA,” Cell 156(5), 935-949, which is incorporated herein by reference). Thus, nickase mutations in the HNH domain could include H840X and R863X, wherein X is any amino acid other than the wild type amino acid. In certain embodiments, the nickase could be H840A or R863A or a combination thereof.

[0331] In various embodiments, the Cas9 nickase can have a mutation in the HNH nuclease domain and have one of the following amino acid sequences, or a variant thereof having an amino acid sequence that has at least 80%, at least 85%, at least 90%, at least 95%, or at least 99% sequence identity thereto.

| Description | Sequence | SEQ ID NO: |
|---|---|---|
| Cas9 nickase | MDKKYSIGLDIGTNSVGWAVITDEYKVPSKKFKVLGNTD | SEQ ID NO: |
| Streptococcus | RHSIKKNLIGALLFDSGETAEATRLKRTARRRYTRRKNRI | 50 |
| pyogenes | CYLQEIFSNEMAKVDDSFFHRLEESFLVEEDKKHERHPIF | |
| Q99ZW2 | GNIVDEVAYHEKYPTIYHLRKKLVDSTDKADLRLIYLAL | |
| Cas9 with | AHMIKFRGHFLIEGDLNPDNSDVDKLFIQLVQTYNQLFEE | |
| H840X, | NPINASGVDAKAILSARLSKSRRLENLIAQLPGEKKNGLF | |
| wherein X is | GNLIALSLGLTPNFKSNFDLAEDAKLQLSKDTYDDDLDN | |
| any alternate | LLAQIGDQYADLFLAAKNLSDAILLSDILRVNTEITKAPLS | |
| amino acid | ASMIKRYDEHHQDLTLLKALVRQQLPEKYKEIFFDQSKN | |
| | GYAGYIDGGASQEEFYKFIKPILEKMDGTEELLVKLNRE | |
| | DLLRKQRTFDNGSIPHQIHLGELHAILRRQEDFYPFLKDN | |
| | REKIEKILTFRIPYYVGPLARGNSRFAWMTRKSEETITPW | |
| | NFEEVVDKGASAQSFIERMTNFDKNLPNEKVLPKHSLLY | |
| | EYFTVYNELTKVKYVTEGMRKPAFLSGEQKKAIVDLLFK | |
| | TNRKVTVKQLKEDYFKKIECFDSVEISGVEDRFNASLGT | |
| | YHDLLKIIKDKDFLDNEENEDILEDIVLTLTLFEDREMIEE | |
| | RLKTYAHLFDDKVMKQLKRRRYTGWGRLSRKLINGIRD | |
| | KQSGKTILDFLKSDGFANRNFMQLIHDDSLTFKEDIQKAQ | |
| | VSGQGDSLHEHIANLAGSPAIKKGILQTVKVVDELVKVM | |
| | GRHKPENIVIEMARENQTTQKGQKNSRERMKRIEEGIKE | |
| | LGSQILKEHPVENTQLQNEKLYLYYLQNGRDMYVDQEL | |
| | DINRLSDYDVDXIVPQSFLKDDSIDNKVLTRSDKNRGKS | |
| | DNVPSEEVVKKMKNYWRQLLNAKLITQRKFDNLTKAER | |
| | GGLSELDKAGFIKRQLVETRQITKHVAQILDSRMNTKYD | |
| | ENDKLIREVKVITLKSKLVSDFRKDFQFYKVREINNYHH | |
| | AHDAYLNAVVGTALIKKYPKLESEFVYGDYKVYDVRK | |
| | MIAKSEQEIGKATAKYFFYSNIMNFFKTEITLANGEIRKRP | |
| | LIETNGETGEIVWDKGRDFATVRKVLSMPQVNIVKKTEV | |
| | QTGGFSKESILPKRNSDKLIARKKDWDPKKYGGFDSPTV | |
| | AYSVLVVAKVEKGKSKKLKSVKELLGITIMERSSFEKNPI | |
| | DFLEAKGYKEVKKDLIIKLPKYSLFELENGRKRMLASAG | |
| | ELQKGNELALPSKYVNFLYLASHYEKLKGSPEDNEQKQL | |
| | FVEQHKHYLDEIIEQISEFSKRVILADANLDKVLSAYNKH | |
| | RDKPIREQAENIIHLFTLTNLGAPAAFKYFDTTIDRKRYTS | |
| | TKEVLDATLIHQSITGLYETRIDLSQLGGD | |
| Cas9 nickase | MDKKYSIGLDIGTNSVGWAVITDEYKVPSKKFKVLGNTD | SEQ ID NO: |
| Streptococcus | RHSIKKNLIGALLFDSGETAEATRLKRTARRRYTRRKNRI | 51 |
| pyogenes | CYLQEIFSNEMAKVDDSFFHRLEESFLVEEDKKHERHPIF | |
| Q99ZW2 | GNIVDEVAYHEKYPTIYHLRKKLVDSTDKADLRLIYLAL | |
| Cas 9 with | AHMIKFRGHFLIEGDLNPDNSDVDKLFIQLVQTYNQLFEE | |
| H840A | NPINASGVDAKAILSARLSKSRRLENLIAQLPGEKKNGLF | |
| | GNLIALSLGLTPNFKSNFDLAEDAKLQLSKDTYDDDLDN | |
| | LLAQIGDQYADLFLAAKNLSDAILLSDILRVNTEITKAPLS | |
| | ASMIKRYDEHHQDLTLLKALVRQQLPEKYKEIFFDQSKN | |
| | GYAGYIDGGASQEEFYKFIKPILEKMDGTEELLVKLNRE | |
| | DLLRKQRTFDNGSIPHQIHLGELHAILRRQEDFYPFLKDN | |
| | REKIEKILTFRIPYYVGPLARGNSRFAWMTRKSEETITPW | |
| | NFEEVVDKGASAQSFIERMTNFDKNLPNEKVLPKHSLLY | |
| | EYFTVYNELTKVKYVTEGMRKPAFLSGEQKKAIVDLLFK | |
| | TNRKVTVKQLKEDYFKKIECFDSVEISGVEDRFNASLGT | |
| | YHDLLKIIKDKDFLDNEENEDILEDIVLTLTLFEDREMIEE | |
| | RLKTYAHLFDDKVMKQLKRRRYTGWGRLSRKLINGIRD | |
| | KQSGKTILDFLKSDGFANRNFMQLIHDDSLTFKEDIQKAQ | |
| | VSGQGDSLHEHIANLAGSPAIKKGILQTVKVVDELVKVM | |
| | GRHKPENIVIEMARENQTTQKGQKNSRERMKRIEEGIKE | |
| | LGSQILKEHPVENTQLQNEKLYLYYLQNGRDMYVDQEL | |
| | DINRLSDYDVDAIVPQSFLKDDSIDNKVLTRSDKNRGKS | |
| | DNVPSEEVVKKMKNYWRQLLNAKLITQRKFDNLTKAER | |
| | GGLSELDKAGFIKRQLVETRQITKHVAQILDSRMNTKYD | |
| | ENDKLIREVKVITLKSKLVSDFRKDFQFYKVREINNYHH | |
| | AHDAYLNAVVGTALIKKYPKLESEFVYGDYKVYDVRK | |
| | MIAKSEQEIGKATAKYFFYSNIMNFFKTEITLANGEIRKRP | |
| | LIETNGETGEIVWDKGRDFATVRKVLSMPQVNIVKKTEV | |
| | QTGGFSKESILPKRNSDKLIARKKDWDPKKYGGFDSPTV | |
| | AYSVLVVAKVEKGKSKKLKSVKELLGITIMERSSFEKNPI | |
| | DFLEAKGYKEVKKDLIIKLPKYSLFELENGRKRMLASAG | |
| | ELQKGNELALPSKYVNFLYLASHYEKLKGSPEDNEQKQL | |
| | FVEQHKHYLDEIIEQISEFSKRVILADANLDKVLSAYNKH | |
| | RDKPIREQAENIIHLFTLTNLGAPAAFKYFDTTIDRKRYTS | |
| | TKEVLDATLIHQSITGLYETRIDLSQLGGD | |
| Cas9 nickase | MDKKYSIGLDIGTNSVGWAVITDEYKVPSKKFKVLGNTD | SEQ ID NO: |
| Streptococcus | RHSIKKNLIGALLFDSGETAEATRLKRTARRRYTRRKNRI | 52 |
| pyogenes | CYLQEIFSNEMAKVDDSFFHRLEESFLVEEDKKHERHPIF | |
| Q99ZW2 | GNIVDEVAYHEKYPTIYHLRKKLVDSTDKADLRLIYLAL | |
| Cas9 with | AHMIKFRGHFLIEGDLNPDNSDVDKLFIQLVQTYNQLFEE | |
| R863X, | NPINASGVDAKAILSARLSKSRRLENLIAQLPGEKKNGLF | |
| wherein X is | GNLIALSLGLTPNFKSNFDLAEDAKLQLSKDTYDDDLDN | |
| any alternate | LLAQIGDQYADLFLAAKNLSDAILLSDILRVNTEITKAPLS | |
| amino acid | ASMIKRYDEHHQDLTLLKALVRQQLPEKYKEIFFDQSKN | |
| | GYAGYIDGGASQEEFYKFIKPILEKMDGTEELLVKLNRE | |
| | DLLRKQRTFDNGSIPHQIHLGELHAILRRQEDFYPFLKDN | |
| | REKIEKILTFRIPYYVGPLARGNSRFAWMTRKSEETITPW | |
| | NFEEVVDKGASAQSFIERMTNFDKNLPNEKVLPKHSLLY | |
| | EYFTVYNELTKVKYVTEGMRKPAFLSGEQKKAIVDLLFK | |
| | TNRKVTVKQLKEDYFKKIECFDSVEISGVEDRFNASLGT | |
| | YHDLLKIIKDKDFLDNEENEDILEDIVLTLTLFEDREMIEE | |
| | RLKTYAHLFDDKVMKQLKRRRYTGWGRLSRKLINGIRD | |
| | KQSGKTILDFLKSDGFANRNFMQLIHDDSLTFKEDIQKAQ | |
| | VSGQGDSLHEHIANLAGSPAIKKGILQTVKVVDELVKVM | |
| | GRHKPENIVIEMARENQTTQKGQKNSRERMKRIEEGIKE | |
| | LGSQILKEHPVENTQLQNEKLYLYYLQNGRDMYVDQEL | |
| | DINRLSDYDVDHIVPQSFLKDDSIDNKVLTRSDKNXGKS | |
| | DNVPSEEVVKKMKNYWRQLLNAKLITQRKFDNLTKAER | |
| | GGLSELDKAGFIKRQLVETRQITKHVAQILDSRMNTKYD | |
| | ENDKLIREVKVITLKSKLVSDFRKDFQFYKVREINNYHH | |
| | AHDAYLNAVVGTALIKKYPKLESEFVYGDYKVYDVRK | |
| | MIAKSEQEIGKATAKYFFYSNIMNFFKTEITLANGEIRKRP | |
| | LIETNGETGEIVWDKGRDFATVRKVLSMPQVNIVKKTEV | |
| | QTGGFSKESILPKRNSDKLIARKKDWDPKKYGGFDSPTV | |
| | AYSVLVVAKVEKGKSKKLKSVKELLGITIMERSSFEKNPI | |
| | DFLEAKGYKEVKKDLIIKLPKYSLFELENGRKRMLASAG | |
| | ELQKGNELALPSKYVNFLYLASHYEKLKGSPEDNEQKQL | |
| | FVEQHKHYLDEIIEQISEFSKRVILADANLDKVLSAYNKH | |
| | RDKPIREQAENIIHLFTLTNLGAPAAFKYFDTTIDRKRYTS | |
| | TKEVLDATLIHQSITGLYETRIDLSQLGGD | |
| Cas9 nickase | MDKKYSIGLDIGTNSVGWAVITDEYKVPSKKFKVLGNTD | SEQ ID NO: |
| Streptococcus | RHSIKKNLIGALLFDSGETAEATRLKRTARRRYTRRKNRI | 53 |
| pyogenes | CYLQEIFSNEMAKVDDSFFHRLEESFLVEEDKKHERHPIF | |
| Q99ZW2 | GNIVDEVAYHEKYPTIYHLRKKLVDSTDKADLRLIYLAL | |
| Cas9 with | AHMIKFRGHFLIEGDLNPDNSDVDKLFIQLVQTYNQLFEE | |
| R863A | NPINASGVDAKAILSARLSKSRRLENLIAQLPGEKKNGLF | |
| wherein X is | GNLIALSLGLTPNFKSNFDLAEDAKLQLSKDTYDDDLDN | |
| any alternate | LLAQIGDQYADLFLAAKNLSDAILLSDILRVNTEITKAPLS | |
| amino acid | ASMIKRYDEHHQDLTLLKALVRQQLPEKYKEIFFDQSKN | |
| | GYAGYIDGGASQEEFYKFIKPILEKMDGTEELLVKLNRE | |
| | DLLRKQRTFDNGSIPHQIHLGELHAILRRQEDFYPFLKDN | |
| | REKIEKILTFRIPYYVGPLARGNSRFAWMTRKSEETITPW | |
| | NFEEVVDKGASAQSFIERMTNFDKNLPNEKVLPKHSLLY | |
| | EYFTVYNELTKVKYVTEGMRKPAFLSGEQKKAIVDLLFK | |
| | TNRKVTVKQLKEDYFKKIECFDSVEISGVEDRFNASLGT | |
| | YHDLLKIIKDKDFLDNEENEDILEDIVLTLTLFEDREMIEE | |
| | RLKTYAHLFDDKVMKQLKRRRYTGWGRLSRKLINGIRD | |
| | KQSGKTILDFLKSDGFANRNFMQLIHDDSLTFKEDIQKAQ | |
| | VSGQGDSLHEHIANLAGSPAIKKGILQTVKVVDELVKVM | |
| | GRHKPENIVIEMARENQTTQKGQKNSRERMKRIEEGIKE | |
| | LGSQILKEHPVENTQLQNEKLYLYYLQNGRDMYVDQEL | |
| | DINRLSDYDVDHIVPQSFLKDDSIDNKVLTRSDKNAGKS | |
| | DNVPSEEVVKKMKNYWRQLLNAKLITQRKFDNLTKAER | |
| | GGLSELDKAGFIKRQLVETRQITKHVAQILDSRMNTKYD | |
| | ENDKLIREVKVITLKSKLVSDFRKDFQFYKVREINNYHH | |
| | AHDAYLNAVVGTALIKKYPKLESEFVYGDYKVYDVRK | |
| | MIAKSEQEIGKATAKYFFYSNIMNFFKTEITLANGEIRKRP | |
| | LIETNGETGEIVWDKGRDFATVRKVLSMPQVNIVKKTEV | |
| | QTGGFSKESILPKRNSDKLIARKKDWDPKKYGGFDSPTV | |
| | AYSVLVVAKVEKGKSKKLKSVKELLGITIMERSSFEKNPI | |
| | DFLEAKGYKEVKKDLIIKLPKYSLFELENGRKRMLASAG | |
| | ELQKGNELALPSKYVNFLYLASHYEKLKGSPEDNEQKQL | |
| | FVEQHKHYLDEIIEQISEFSKRVILADANLDKVLSAYNKH | |
| | RDKPIREQAENIIHLFTLTNLGAPAAFKYFDTTIDRKRYTS | |
| | TKEVLDATLIHQSITGLYETRIDLSQLGGD | |

[0332] In some embodiments, the N-terminal methionine is removed from a Cas9 nickase, or from any Cas9 variant, ortholog, or equivalent disclosed or contemplated herein. For example, methionine-minus Cas9 nickases include the following sequences, or a variant thereof having an amino acid sequence that has at least 80%, at least 85%, at least 90%, at least 95%, or at least 99% sequence identity thereto.

| Description | Sequence |
|---|---|
| Cas9 nickase | DKKYSIGLDIGTNSVGWAVITDEYKVPSKKFKVLGNTDRHSIKKNLIG |
| (Met minus) | ALLFDSGETAEATRLKRTARRRYTRRKNRICYLQEIFSNEMAKVDDSF |
| Streptococcus | FHRLEESFLVEEDKKHERHPIFGNIVDEVAYHEKYPTIYHLRKKLVDST |
| pyogenes | DKADLRLIYLALAHMIKFRGHFLIEGDLNPDNSDVDKLFIQLVQTYNQ |
| Q99ZW2 | LFEENPINASGVDAKAILSARLSKSRRLENLIAQLPGEKKNGLFGNLIAL |
| Cas9 with | SLGLTPNFKSNFDLAEDAKLQLSKDTYDDDLDNLLAQIGDQYADLFLA |
| H840X, | AKNLSDAILLSDILRVNTEITKAPLSASMIKRYDEHHQDLTLLKALVRQ |
| wherein X is | QLPEKYKEIFFDQSKNGYAGYIDGGASQEEFYKFIKPILEKMDGTEELL |
| any alternate | VKLNREDLLRKQRTFDNGSIPHQIHLGELHAILRRQEDFYPFLKDNREK |
| amino acid | IEKILTFRIPYYVGPLARGNSRFAWMTRKSEETITPWNFEEVVDKGASA |
| | QSFIERMTNFDKNLPNEKVLPKHSLLYEYFTVYNELTKVKYVTEGMR |
| | KPAFLSGEQKKAIVDLLFKTNRKVTVKQLKEDYFKKIECFDSVETSGVE |
| | DRFNASLGTYHDLLKIIKDKDFLDNEENEDILEDIVLTLTLFEDREMIEE |
| | RLKTYAHLFDDKVMKQLKRRRYTGWGRLSRKLINGIRDKQSGKTILD |
| | FLKSDGFANRNFMQLIHDDSLTFKEDIQKAQVSGQGDSLHEHIANLAG |
| | SPAIKKGILQTVKVVDELVKVMGRHKPENIVIEMARENQTTQKGQKNS |
| | RERMKRIEEGIKELGSQILKEHPVENTQLQNEKLYLYYLQNGRDMYV |
| | DQELDINRLSDYDVDXIVPQSFLKDDSIDNKVLTRSDKNRGKSDNVPS |
| | EEVVKKMKNYWRQLLNAKLITQRKFDNLTKAERGGLSELDKAGFIKR |
| | QLVETRQITKHVAQILDSRMNTKYDENDKLIREVKVITLKSKLVSDFR |
| | KDFQFYKVREINNYHHAHDAYLNAVVGTALIKKYPKLESEFVYGDYK |
| | VYDVRKMIAKSEQEIGKATAKYFFYSNIMNFFKTEITLANGEIRKRPLIE |
| | TNGETGEIVWDKGRDFATVRKVLSMPQVNIVKKTEVQTGGFSKESILP |
| | KRNSDKLIARKKDWDPKKYGGFDSPTVAYSVLVVAKVEKGKSKKLK |
| | SVKELLGITIMERSSFEKNPIDFLEAKGYKEVKKDLIIKLPKYSLFELEN |
| | GRKRMLASAGELQKGNELALPSKYVNFLYLASHYEKLKGSPEDNEQK |
| | QLFVEQHKHYLDEIIEQISEFSKRVILADANLDKVLSAYNKHRDKPIRE |
| | QAENIIHLFTLTNLGAPAAFKYFDTTIDRKRYTSTKEVLDATLIHQSITG |
| | LYETRIDLSQLGGD (SEQ ID NO: 54) |
| Cas9 nickase | DKKYSIGLDIGTNSVGWAVITDEYKVPSKKFKVLGNTDRHSIKKNLIG |
| (Met minus) | ALLFDSGETAEATRLKRTARRRYTRRKNRICYLQEIFSNEMAKVDDSF |
| Streptococcus | FHRLEESFLVEEDKKHERHPIFGNIVDEVAYHEKYPTIYHLRKKLVDST |
| pyogenes | DKADLRLIYLALAHMIKFRGHFLIEGDLNPDNSDVDKLFIQLVQTYNQ |
| Q99ZW2 | LFEENPINASGVDAKAILSARLSKSRRLENLIAQLPGEKKNGLFGNLIAL |
| Cas9 with | SLGLTPNFKSNFDLAEDAKLQLSKDTYDDDLDNLLAQIGDQYADLFLA |
| H840A | AKNLSDAILLSDILRVNTEITKAPLSASMIKRYDEHHQDLTLLKALVRQ |
| | QLPEKYKEIFFDQSKNGYAGYIDGGASQEEFYKFIKPILEKMDGTEELL |
| | VKLNREDLLRKQRTFDNGSIPHQIHLGELHAILRRQEDFYPFLKDNREK |
| | IEKILTFRIPYYVGPLARGNSRFAWMTRKSEETITPWNFEEVVDKGASA |
| | QSFIERMTNFDKNLPNEKVLPKHSLLYEYFTVYNELTKVKYVTEGMR |
| | KPAFLSGEQKKAIVDLLFKTNRKVTVKQLKEDYFKKIECFDSVETSGVE |
| | DRFNASLGTYHDLLKIIKDKDFLDNEENEDILEDIVLTLTLFEDREMIEE |
| | RLKTYAHLFDDKVMKQLKRRRYTGWGRLSRKLINGIRDKQSGKTILD |
| | FLKSDGFANRNFMQLIHDDSLTFKEDIQKAQVSGQGDSLHEHIANLAG |
| | SPAIKKGILQTVKVVDELVKVMGRHKPENIVIEMARENQTTQKGQKNS |
| | RERMKRIEEGIKELGSQILKEHPVENTQLQNEKLYLYYLQNGRDMYV |
| | DQELDINRLSDYDVDAIVPQSFLKDDSIDNKVLTRSDKNRGKSDNVPS |
| | EEVVKKMKNYWRQLLNAKLITQRKFDNLTKAERGGLSELDKAGFIKR |
| | QLVETRQITKHVAQILDSRMNTKYDENDKLIREVKVITLKSKLVSDFR |
| | KDFQFYKVREINNYHHAHDAYLNAVVGTALIKKYPKLESEFVYGDYK |
| | VYDVRKMIAKSEQEIGKATAKYFFYSNIMNFFKTEITLANGEIRKRPLIE |
| | TNGETGEIVWDKGRDFATVRKVLSMPQVNIVKKTEVQTGGFSKESILP |
| | KRNSDKLIARKKDWDPKKYGGFDSPTVAYSVLVVAKVEKGKSKKLK |
| | SVKELLGITIMERSSFEKNPIDFLEAKGYKEVKKDLIIKLPKYSLFELEN |
| | GRKRMLASAGELQKGNELALPSKYVNFLYLASHYEKLKGSPEDNEQK |
| | QLFVEQHKHYLDEIIEQISEFSKRVILADANLDKVLSAYNKHRDKPIRE |
| | QAENIIHLFTLTNLGAPAAFKYFDTTIDRKRYTSTKEVLDATLIHQSITG |
| | LYETRIDLSQLGGD (SEQ ID NO: 55) |
| Cas9 nickase | DKKYSIGLDIGTNSVGWAVITDEYKVPSKKFKVLGNTDRHSIKKNLIG |
| (Met minus) | ALLFDSGETAEATRLKRTARRRYTRRKNRICYLQEIFSNEMAKVDDSF |
| Streptococcus | FHRLEESFLVEEDKKHERHPIFGNIVDEVAYHEKYPTIYHLRKKLVDST |
| pyogenes | DKADLRLIYLALAHMIKFRGHFLIEGDLNPDNSDVDKLFIQLVQTYNQ |
| Q99ZW2 | LFEENPINASGVDAKAILSARLSKSRRLENLIAQLPGEKKNGLFGNLIAL |
| Cas9 with | SLGLTPNFKSNFDLAEDAKLQLSKDTYDDDLDNLLAQIGDQYADLFLA |
| R863X, | AKNLSDAILLSDILRVNTEITKAPLSASMIKRYDEHHQDLTLLKALVRQ |
| wherein X is | QLPEKYKEIFFDQSKNGYAGYIDGGASQEEFYKFIKPILEKMDGTEELL |
| any alternate | VKLNREDLLRKQRTFDNGSIPHQIHLGELHAILRRQEDFYPFLKDNREK |
| amino acid | IEKILTFRIPYYVGPLARGNSRFAWMTRKSEETITPWNFEEVVDKGASA |
| | QSFIERMTNFDKNLPNEKVLPKHSLLYEYFTVYNELTKVKYVTEGMR |
| | KPAFLSGEQKKAIVDLLFKTNRKVTVKQLKEDYFKKIECFDSVETSGVE |
| | DRFNASLGTYHDLLKIIKDKDFLDNEENEDILEDIVLTLTLFEDREMIEE |
| | RLKTYAHLFDDKVMKQLKRRRYTGWGRLSRKLINGIRDKQSGKTILD |
| | FLKSDGFANRNFMQLIHDDSLTFKEDIQKAQVSGQGDSLHEHIANLAG |
| | SPAIKKGILQTVKVVDELVKVMGRHKPENIVIEMARENQTTQKGQKNS |
| | RERMKRIEEGIKELGSQILKEHPVENTQLQNEKLYLYYLQNGRDMYV |
| | DQELDINRLSDYDVDHIVPQSFLKDDSIDNKVLTRSDKNXGKSDNVPS |
| | EEVVKKMKNYWRQLLNAKLITQRKFDNLTKAERGGLSELDKAGFIKR |
| | QLVETRQITKHVAQILDSRMNTKYDENDKLIREVKVITLKSKLVSDFR |
| | KDFQFYKVREINNYHHAHDAYLNAVVGTALIKKYPKLESEFVYGDYK |
| | VYDVRKMIAKSEQEIGKATAKYFFYSNIMNFFKTEITLANGEIRKRPLIE |
| | TNGETGEIVWDKGRDFATVRKVLSMPQVNIVKKTEVQTGGFSKESILP |
| | KRNSDKLIARKKDWDPKKYGGFDSPTVAYSVLVVAKVEKGKSKKLK |
| | SVKELLGITIMERSSFEKNPIDFLEAKGYKEVKKDLIIKLPKYSLFELEN |
| | GRKRMLASAGELQKGNELALPSKYVNFLYLASHYEKLKGSPEDNEQK |
| | QLFVEQHKHYLDEIIEQISEFSKRVILADANLDKVLSAYNKHRDKPIRE |
| | QAENIIHLFTLTNLGAPAAFKYFDTTIDRKRYTSTKEVLDATLIHQSTTG |
| | LYETRIDLSQLGGD (SEQ ID NO: 56) |
| Cas9 nickase | DKKYSIGLDIGTNSVGWAVITDEYKVPSKKFKVLGNTDRHSIKKNLIG |
| (Met minus) | ALLFDSGETAEATRLKRTARRRYTRRKNRICYLQEIFSNEMAKVDDSF |
| Streptococcus | FHRLEESFLVEEDKKHERHPIFGNIVDEVAYHEKYPTIYHLRKKLVDST |
| pyogenes | DKADLRLIYLALAHMIKFRGHFLIEGDLNPDNSDVDKLFIQLVQTYNQ |
| Q99ZW2 | LFEENPINASGVDAKAILSARLSKSRRLENLIAQLPGEKKNGLFGNLIAL |
| Cas9 with | SLGLTPNFKSNFDLAEDAKLQLSKDTYDDDLDNLLAQIGDQYADLFLA |
| R863A | AKNLSDAILLSDILRVNTEITKAPLSASMIKRYDEHHQDLTLLKALVRQ |
| | QLPEKYKEIFFDQSKNGYAGYIDGGASQEEFYKFIKPILEKMDGTEELL |
| | VKLNREDLLRKQRTFDNGSIPHQIHLGELHAILRRQEDFYPFLKDNREK |
| | IEKILTFRIPYYVGPLARGNSRFAWMTRKSEETITPWNFEEVVDKGASA |
| | QSFIERMTNFDKNLPNEKVLPKHSLLYEYFTVYNELTKVKYVTEGMR |
| | KPAFLSGEQKKAIVDLLFKTNRKVTVKQLKEDYFKKIECFDSVETSGVE |
| | DRFNASLGTYHDLLKIIKDKDFLDNEENEDILEDIVLTLTLFEDREMIEE |
| | RLKTYAHLFDDKVMKQLKRRRYTGWGRLSRKLINGIRDKQSGKTILD |
| | FLKSDGFANRNFMQLIHDDSLTFKEDIQKAQVSGQGDSLHEHIANLAG |
| | SPAIKKGILQTVKVVDELVKVMGRHKPENIVIEMARENQTTQKGQKNS |
| | RERMKRIEEGIKELGSQILKEHPVENTQLQNEKLYLYYLQNGRDMYV |
| | DQELDINRLSDYDVDHIVPQSFLKDDSIDNKVLTRSDKNAGKSDNVPS |
| | EEVVKKMKNYWRQLLNAKLITQRKFDNLTKAERGGLSELDKAGFIKR |
| | QLVETRQITKHVAQILDSRMNTKYDENDKLIREVKVITLKSKLVSDFR |
| | KDFQFYKVREINNYHHAHDAYLNAVVGTALIKKYPKLESEFVYGDYK |
| | VYDVRKMIAKSEQEIGKATAKYFFYSNIMNFFKTEITLANGEIRKRPLIE |
| | TNGETGEIVWDKGRDFATVRKVLSMPQVNIVKKTEVQTGGFSKESILP |
| | KRNSDKLIARKKDWDPKKYGGFDSPTVAYSVLVVAKVEKGKSKKLK |
| | SVKELLGITIMERSSFEKNPIDFLEAKGYKEVKKDLIIKLPKYSLFELEN |
| | GRKRMLASAGELQKGNELALPSKYVNFLYLASHYEKLKGSPEDNEQK |
| | QLFVEQHKHYLDEIIEQISEFSKRVILADANLDKVLSAYNKHRDKPIRE |
| | QAENIIHLFTLTNLGAPAAFKYFDTTIDRKRYTSTKEVLDATLIHQSITG |
| | LYETRIDLSQLGGD (SEQ ID NO: 57) |

[0333] E. Other Cas9 Variants

[0334] Besides dead Cas9 and Cas9 nickase variants, the Cas9 proteins used herein may also include other “Cas9 variants” having at least about 70% identical, at least about 80% identical, at least about 90% identical, at least about 95% identical, at least about 96% identical, at least about 97% identical, at least about 98% identical, at least about 99% identical, at least about 99.5% identical, or at least about 99.9% identical to any reference Cas9 protein, including any wild type Cas9, or mutant Cas9 (e.g., a dead Cas9 or Cas9 nickase), or fragment Cas9, or circular permutant Cas9, or other variant of Cas9 disclosed herein or known in the art. In some embodiments, a Cas9 variant may have 1, 2, 3, 4, 5, 6, 7, 8, 9, 10, 11, 12, 13, 14, 15, 16, 17, 18, 19, 20, 21, 22, 21, 24, 25, 26, 27, 28, 29, 30, 31, 32, 33, 34, 35, 36, 37, 38, 39, 40, 41, 42, 43, 44, 45, 46, 47, 48, 49, 50 or more amino acid changes compared to a reference Cas9. In some embodiments, the Cas9 variant comprises a fragment of a reference Cas9 (e.g., a gRNA binding domain or a DNA-cleavage domain), such that the fragment is at least about 70% identical, at least about 80% identical, at least about 90% identical, at least about 95% identical, at least about 96% identical, at least about 97% identical, at least about 98% identical, at least about 99% identical, at least about 99.5% identical, or at least about 99.9% identical to the corresponding fragment of wild type Cas9. In some embodiments, the fragment is at least 30%, at least 35%, at least 40%, at least 45%, at least 50%, at least 55%, at least 60%, at least 65%, at least 70%, at least 75%, at least 80%, at least 85%, at least 90%, at least 95% identical, at least 96%, at least 97%, at least 98%, at least 99%, or at least 99.5% of the amino acid length of a corresponding wild type Cas9 (e.g., SEQ ID NO: 18).

[0335] In some embodiments, the disclosure also may utilize Cas9 fragments which retain their functionality and which are fragments of any herein disclosed Cas9 protein. In some embodiments, the Cas9 fragment is at least 100 amino acids in length. In some embodiments, the fragment is at least 100, 150, 200, 250, 300, 350, 400, 450, 500, 550, 600, 650, 700, 750, 800, 850, 900, 950, 1000, 1050, 1100, 1150, 1200, 1250, or at least 1300 amino acids in length.

[0336] In various embodiments, the prime editors disclosed herein may comprise one of the Cas9 variants described as follows, or a Cas9 variant thereof having at least about 70% identical, at least about 80% identical, at least about 90% identical, at least about 95% identical, at least about 96% identical, at least about 97% identical, at least about 98% identical, at least about 99% identical, at least about 99.5% identical, or at least about 99.9% identical to any reference Cas9 variants.

[0337] F. Small-Sized Cas9 Variants

[0338] In some embodiments, the prime editors contemplated herein can include a Cas9 protein that is of smaller molecular weight than the canonical SpCas9 sequence. In some embodiments, the smaller-sized Cas9 variants may facilitate delivery to cells, e.g., by an expression vector, nanoparticle, or other means of delivery. In certain embodiments, the smaller-sized Cas9 variants can include enzymes categorized as type II enzymes of the Class 2 CRISPR-Cas systems. In some embodiments, the smaller-sized Cas9 variants can include enzymes categorized as type V enzymes of the Class 2 CRISPR-Cas systems. In other embodiments, the smaller-sized Cas9 variants can include enzymes categorized as type VI enzymes of the Class 2 CRISPR-Cas systems.

[0339] The canonical SpCas9 protein is 1368 amino acids in length and has a predicted molecular weight of 158 kilodaltons. The term “small-sized Cas9 variant”, as used herein, refers to any Cas9 variant—naturally occurring, engineered, or otherwise—that is less than at least 1300 amino acids, or at least less than 1290 amino acids, or than less than 1280 amino acids, or less than 1270 amino acid, or less than 1260 amino acid, or less than 1250 amino acids, or less than 1240 amino acids, or less than 1230 amino acids, or less than 1220 amino acids, or less than 1210 amino acids, or less than 1200 amino acids, or less than 1190 amino acids, or less than 1180 amino acids, or less than 1170 amino acids, or less than 1160 amino acids, or less than 1150 amino acids, or less than 1140 amino acids, or less than 1130 amino acids, or less than 1120 amino acids, or less than 1110 amino acids, or less than 1100 amino acids, or less than 1050 amino acids, or less than 1000 amino acids, or less than 950 amino acids, or less than 900 amino acids, or less than 850 amino acids, or less than 800 amino acids, or less than 750 amino acids, or less than 700 amino acids, or less than 650 amino acids, or less than 600 amino acids, or less than 550 amino acids, or less than 500 amino acids, but at least larger than about 400 amino acids and retaining the required functions of the Cas9 protein. The Cas9 variants can include those categorized as type II, type V, or type VI enzymes of the Class 2 CRISPR-Cas system.

[0340] In various embodiments, the prime editors disclosed herein may comprise one of the small-sized Cas9 variants described as follows, or a Cas9 variant thereof having at least about 70% identical, at least about 80% identical, at least about 90% identical, at least about 95% identical, at least about 96% identical, at least about 97% identical, at least about 98% identical, at least about 99% identical, at least about 99.5% identical, or at least about 99.9% identical to any reference small-sized Cas9 protein.

| Description | Sequence | SEQ ID NO: |
|---|---|---|
| SaCas9 | MGKRNYILGLDIGITSVGYGIIDYETRDVIDAGVRLFKEA | SEQ ID NO: |
| Staphylococcus | NVENNEGRRSKRGARRLKRRRRHRIQRVKKLLFDYNLL | 58 |
| aureus | TDHSELSGINPYEARVKGLSQKLSEEEFSAALLHLAKRRG | |
| 1053 AA | VHNVNEVEEDTGNELSTKEQISRNSKALEEKYVAELQLE | |
| 123 kDa | RLKKDGEVRGSINRFKTSDYVKEAKQLLKVQKAYHQLD | |
| | QSFIDTYIDLLETRRTYYEGPGEGSPFGWKDIKEWYEML | |
| | MGHCTYFPEELRSVKYAYNADLYNALNDLNNLVITRDE | |
| | NEKLEYYEKFQIIENVFKQKKKPTLKQIAKEILVNEEDIK | |
| | GYRVTSTGKPEFTNLKVYHDIKDITARKEIIENAELLDQIA | |
| | KILTIYQSSEDIQEELTNLNSELTQEEIEQISNLKGYTGTHN | |
| | LSLKAINLILDELWHTNDNQIAIFNRLKLVPKKVDLSQQK | |
| | EIPTTLVDDFILSPVVKRSFIQSIKVINAIIKKYGLPNDIIIEL | |
| | AREKNSKDAQKMINEMQKRNRQTNERIEEIIRTTGKENA | |
| | KYLIEKIKLHDMQEGKCLYSLEAIPLEDLLNNPFNYEVDH | |
| | IIPRSVSFDNSFNNKVLVKQEENSKKGNRTPFQYLSSSDS | |
| | KISYETFKKHILNLAKGKGRISKTKKEYLLEERDINRFSV | |
| | QKDFINRNLVDTRYATRGLMNLLRSYFRVNNLDVKVKSI | |
| | NGGFTSFLRRKWKFKKERNKGYKHHAEDALIIANADFIF | |
| | KEWKKLDKAKKVMENQMFEEKQAESMPEIETEQEYKEI | |
| | FITPHQIKHIKDFKDYKYSHRVDKKPNRKLINDTLYSTRK | |
| | DDKGNTLIVNNLNGLYDKDNDKLKKLINKSPEKLLMYH | |
| | HDPQTYQKLKLIMEQYGDEKNPLYKYYEETGNYLTKYS | |
| | KKDNGPVIKKIKYYGNKLNAHLDITDDYPNSRNKVVKLS | |
| | LKPYRFDVYLDNGVYKFVTVKNLDVIKKENYYEVNSKC | |
| | YEEAKKLKKISNQAEFIASFYKNDLIKINGELYRVIGVNN | |
| | DLLNRIEVNMIDITYREYLENMNDKRPPHIIKTIASKTQSI | |
| | KKYSTDILGNLYEVKSKKHPQIIKK | |
| NmeCas9 | MAAFKPNSINYILGLDIGIASVGWAMVEIDEEENPIRLIDL | SEQ ID NO: |
| N. | GVRVFERAEVPKTGDSLAMARRLARSVRRLTRRRAHRL | 59 |
| meningitidis | LRTRRLLKREGVLQAANFDENGLIKSLPNTPWQLRAAAL | |
| 1083 AA | DRKLTPLEWSAVLLHLIKHRGYLSQRKNEGETADKELGA | |
| 124.5 kDa | LLKGVAGNAHALQTGDFRTPAELALNKFEKESGHIRNQR | |
| | SDYSHTFSRKDLQAELILLFEKQKEFGNPHVSGGLKEGIE | |
| | TLLMTQRPALSGDAVQKMLGHCTFEPAEPKAAKNTYTA | |
| | ERFIWLTKLNNLRILEQGSERPLTDTERATLMDEPYRKSK | |
| | LTYAQARKLLGLEDTAFFKGLRYGKDNAEASTLMEMKA | |
| | YHAISRALEKEGLKDKKSPLNLSPELQDEIGTAFSLFKTD | |
| | EDITGRLKDRIQPEILEALLKHISFDKFVQISLKALRRIVPL | |
| | MEQGKRYDEACAEIYGDHYGKKNTEEKIYLPPIPADEIR | |
| | NPVVLRALSQARKVINGVVRRYGSPARIHIETAREVGKSF | |
| | KDRKEIEKRQEENRKDREKAAAKFREYFPNFVGEPKSKD | |
| | ILKLRLYEQQHGKCLYSGKEINLGRLNEKGYVEIDAALPF | |
| | SRTWDDSFNNKVLVLGSENQNKGNQTPYEYFNGKDNSR | |
| | EWQEFKARVETSRFPRSKKQRILLQKFDEDGFKERNLND | |
| | TRYVNRFLCQFVADRMRLTGKGKKRVFASNGQITNLLR | |
| | GFWGLRKVRAENDRHHALDAVVVACSTVAMQQKITRF | |
| | VRYKEMNAFDGKTIDKETGEVLHQKTHFPQPWEFFAQE | |
| | VMIRVFGKPDGKPEFEEADTLEKLRTLLAEKLSSRPEAVH | |
| | EYVTPLFVSRAPNRKMSGQGHMETVKSAKRLDEGVSVL | |
| | RVPLTQLKLKDLEKMVNREREPKLYEALKARLEAHKDD | |
| | PAKAFAEPFYKYDKAGNRTQQVKAVRVEQVQKTGVWV | |
| | RNHNGIADNATMVRVDVFEKGDKYYLVPIYSWQVAKGI | |
| | LPDRAVVQGKDEEDWQLIDDSFNFKFSLHPNDLVEVITK | |
| | KARMFGYFASCHRGTGNINIRIHDLDHKIGKNGILEGIGV | |
| | KTALSFQKYQIDELGKEIRPCRLKKRPPVR | |
| CjCas9 | MARILAFDIGISSIGWAFSENDELKDCGVRIFTKVENPKT | SEQ ID NO: |
| C. jejuni | GESLALPRRLARSARKRLARRKARLNHLKHLIANEFKLN | 60 |
| 984 AA | YEDYQSFDESLAKAYKGSLISPYELRFRALNELLSKQDFA | |
| 114.9 kDa | RVILHIAKRRGYDDIKNSDDKEKGAILKAIKQNEEKLAN | |
| | YQSVGEYLYKEYFQKFKENSKEFTNVRNKKESYERCIAQ | |
| | SFLKDELKLIFKKQREFGFSFSKKFEEEVLSVAFYKRALK | |
| | DFSHLVGNCSFFTDEKRAPKNSPLAFMFVALTRIINLLNN | |
| | LKNTEGILYTKDDLNALLNEVLKNGTLTYKQTKKLLGLS | |
| | DDYEFKGEKGTYFIEFKKYKEFIKALGEHNLSQDDLNEIA | |
| | KDITLIKDEIKLKKALAKYDLNQNQIDSLSKLEFKDHLNIS | |
| | FKALKLVTPLMLEGKKYDEACNELNLKVAINEDKKDFLP | |
| | AFNETYYKDEVTNPVVLRAIKEYRKVLNALLKKYGKVH | |
| | KINIELAREVGKNHSQRAKIEKEQNENYKAKKDAELECE | |
| | KLGLKINSKNILKLRLFKEQKEFCAYSGEKIKISDLQDEK | |
| | MLEIDHIYPYSRSFDDSYMNKVLVFTKQNQEKLNQTPFE | |
| | AFGNDSAKWQKIEVLAKNLPTKKQKRILDKNYKDKEQK | |
| | NFKDRNLNDTRYIARLVLNYTKDYLDFLPLSDDENTKLN | |
| | DTQKGSKVHVEAKSGMLTSALRHTWGFSAKDRNNHLH | |
| | HAIDAVIIAYANNSIVKAFSDFKKEQESNSAELYAKKISEL | |
| | DYKNKRKFFEPFSGFRQKVLDKIDEIFVSKPERKKPSGAL | |
| | HEETFRKEEEFYQSYGGKEGVLKALELGKIRKVNGKIVK | |
| | NGDMFRVDIFKHKKTNKFYAVPIYTMDFALKVLPNKAV | |
| | ARSKKGEIKDWILMDENYEFCFSLYKDSLILIQTKDMQEP | |
| | EFVYYNAFTSSTVSLIVSKHDNKFETLSKNQKILFKNANE | |
| | KEVIAKSIGIQNLKVFEKYIVSALGEVTKAEFRQREDFKK | |
| GeoCas9 | MRYKIGLDIGITSVGWAVMNLDIPRIEDLGVRIFDRAENP | SEQ ID NO: |
| G. | QTGESLALPRRLARSARRRLRRRKHRLERIRRLVIREGILT | 61 |
| stearothermophilus | KEELDKLFEEKHEIDVWQLRVEALDRKLNNDELARVLL | |
| 1087 AA | HLAKRRGFKSNRKSERSNKENSTMLKHIEENRAILSSYRT | |
| 127 kDa | VGEMIVKDPKFALHKRNKGENYTNTIARDDLEREIRLIFS | |
| | KQREFGNMSCTEEFENEYITIWASQRPVASKDDIEKKVGF | |
| | CTFEPKEKRAPKATYTFQSFIAWEHINKLRLISPSGARGLT | |
| | DEERRLLYEQAFQKNKITYHDIRTLLHLPDDTYFKGIVYD | |
| | RGESRKQNENIRFLELDAYHQIRKAVDKVYGKGKSSSFL | |
| | PIDFDTFGYALTLFKDDADIHSYLRNEYEQNGKRMPNLA | |
| | NKVYDNELIEELLNLSFTKFGHLSLKALRSILPYMEQGEV | |
| | YSSACERAGYTFTGPKKKQKTMLLPNIPPIANPVVMRAL | |
| | TQARKVVNAIIKKYGSPVSIHIELARDLSQTFDERRKTKK | |
| | EQDENRKKNETAIRQLMEYGLTLNPTGHDIVKFKLWSEQ | |
| | NGRCAYSLQPIEIERLLEPGYVEVDHVIPYSRSLDDSYTN | |
| | KVLVLTRENREKGNRIPAEYLGVGTERWQQFETFVLTNK | |
| | QFSKKKRDRLLRLHYDENEETEFKNRNLNDTRYISRFFA | |
| | NFIREHLKFAESDDKQKVYTVNGRVTAHLRSRWEFNKN | |
| | REESDLHHAVDAVIVACTTPSDIAKVTAFYQRREQNKEL | |
| | AKKTEPHFPQPWPHFADELRARLSKHPKESIKALNLGNY | |
| | DDQKLESLQPVFVSRMPKRSVTGAAHQETLRRYVGIDER | |
| | SGKIQTVVKTKLSEIKLDASGHFPMYGKESDPRTYEAIRQ | |
| | RLLEHNNDPKKAFQEPLYKPKKNGEPGPVIRTVKIIDTKN | |
| | QVIPLNDGKTVAYNSNIVRVDVFEKDGKYYCVPVYTMD | |
| | IMKGILPNKAIEPNKPYSEWKEMTEDYTFRFSLYPNDLIRI | |
| | ELPREKTVKTAAGEEINVKDVFVYYKTIDSANGGLELISH | |
| | DHRFSLRGVGSRTLKRFEKYQVDVLGNIYKVRGEKRVG | |
| | LASSAHSKPGKTIRPLQSTRD | |
| LbaCas12a | MSKLEKFTNCYSLSKTLRFKAIPVGKTQENIDNKRLLVED | SEQ ID NO: |
| L. bacterium | EKRAEDYKGVKKLLDRYYLSFINDVLHSIKLKNLNNYIS | 62 |
| 1228 AA | LFRKKTRTEKENKELENLEINLRKEIAKAFKGNEGYKSLF | |
| 143.9 kDa | KKDIIETILPEFLDDKDEIALVNSFNGFTTAFTGFFDNREN | |
| | MFSEEAKSTSIAFRCINENLTRYISNMDIFEKVDAIFDKHE | |
| | VQEIKEKILNSDYDVEDFFEGEFFNFVLTQEGIDVYNAIIG | |
| | GFVTESGEKIKGLNEYINLYNQKTKQKLPKFKPLYKQVL | |
| | SDRESLSFYGEGYTSDEEVLEVFRNTLNKNSEIFSSIKKLE | |
| | KLFKNFDEYSSAGIFVKNGPAISTISKDIFGEWNVIRDKW | |
| | NAEYDDIHLKKKAVVTEKYEDDRRKSFKKIGSFSLEQLQ | |
| | EYADADLSVVEKLKEIIIQKVDEIYKVYGSSEKLFDADFV | |
| | LEKSLKKNDAVVAIMKDLLDSVKSFENYIKAFFGEGKET | |
| | NRDESFYGDFVLAYDILLKVDHIYDAIRNYVTQKPYSKD | |
| | KFKLYFQNPQFMGGWDKDKETDYRATILRYGSKYYLAI | |
| | MDKKYAKCLQKIDKDDVNGNYEKINYKLLPGPNKMLPK | |
| | VFFSKKWMAYYNPSEDIQKIYKNGTFKKGDMFNLNDCH | |
| | KLIDFFKDSISRYPKWSNAYDFNFSETEKYKDIAGFYREV | |
| | EEQGYKVSFESASKKEVDKLVEEGKLYMFQIYNKDFSDK | |
| | SHGTPNLHTMYFKLLFDENNHGQIRLSGGAELFMRRASL | |
| | KKEELVVHPANSPIANKNPDNPKKTTTLSYDVYKDKRFS | |
| | EDQYELHIPIAINKCPKNIFKINTEVRVLLKHDDNPYVIGI | |
| | DRGERNLLYIVVVDGKGNIVEQYSLNEIINNFNGIRIKTD | |
| | YHSLLDKKEKERFEARQNWTSIENIKELKAGYISQVVHKI | |
| | CELVEKYDAVIALEDLNSGFKNSRVKVEKQVYQKFEKM | |
| | LIDKLNYMVDKKSNPCATGGALKGYQITNKFESFKSMST | |
| | QNGFIFYIPAWLTSKIDPSTGFVNLLKTKYTSIADSKKFISS | |
| | FDRIMYVPEEDLFEFALDYKNFSRTDADYIKKWKLYSYG | |
| | NRIRIFRNPKKNNVFDWEEVCLTSAYKELFNKYGINYQQ | |
| | GDIRALLCEQSDKAFYSSFMALMSLMLQMRNSITGRTDV | |
| | DFLISPVKNSDGIFYDSRNYEAQENAILPKNADANGAYNI | |
| | ARKVLWAIGQFKKAEDEKLDKVKIAISNKEWLEYAQTS | |
| | VKH | |
| BhCas12b | MATRSFILKIEPNEEVKKGLWKTHEVLNHGIAYYMNILK | SEQ ID NO: |
| B. hisashii | LIRQEAIYEHHEQDPKNPKKVSKAEIQAELWDFVLKMQK | 63 |
| 1108 AA | CNSFTHEVDKDEVFNILRELYEELVPSSVEKKGEANQLSN | |
| 130.4 kDa | KFLYPLVDPNSQSGKGTASSGRKPRWYNLKIAGDPSWEE | |
| | EKKKWEEDKKKDPLAKILGKLAEYGLIPLFIPYTDSNEPI | |
| | VKEIKWMEKSRNQSVRRLDKDMFIQALERFLSWESWNL | |
| | KVKEEYEKVEKEYKTLEERIKEDIQALKALEQYEKERQE | |
| | QLLRDTLNTNEYRLSKRGLRGWREIIQKWLKMDENEPSE | |
| | KYLEVFKDYQRKHPREAGDYSVYEFLSKKENHFIWRNH | |
| | PEYPYLYATFCEIDKKKKDAKQQATFTLADPINHPLWVR | |
| | FEERSGSNLNKYRILTEQLHTEKLKKKLTVQLDRLIYPTE | |
| | SGGWEEKGKVDIVLLPSRQFYNQIFLDIEEKGKHAFTYK | |
| | DESIKFPLKGTLGGARVQFDRDHLRRYPHKVESGNVGRI | |
| | YFNMTVNIEPTESPVSKSLKIHRDDFPKVVNFKPKELTEW | |
| | IKDSKGKKLKSGIESLEIGLRVMSIDLGQRQAAAASIFEV | |
| | VDQKPDIEGKLFFPIKGTELYAVHRASFNIKLPGETLVKS | |
| | REVLRKAREDNLKLMNQKLNFLRNVLHFQQFEDITEREK | |
| | RVTKWISRQENSDVPLVYQDELIQIRELMYKPYKDWVAF | |
| | LKQLHKRLEVEIGKEVKHWRKSLSDGRKGLYGISLKNID | |
| | EIDRTRKFLLRWSLRPTEPGEVRRLEPGQRFAIDQLNHLN | |
| | ALKEDRLKKMANTIIMHALGYCYDVRKKKWQAKNPAC | |
| | QIILFEDLSNYNPYEERSRFENSKLMKWSRREIPRQVALQ | |
| | GEIYGLQVGEVGAQFSSRFHAKTGSPGIRCSVVTKEKLQ | |
| | DNRFFKNLQREGRLTLDKIAVLKEGDLYPDKGGEKFISLS | |
| | KDRKCVTTHADINAAQNLQKRFWTRTHGFYKVYCKAY | |
| | QVDGQTVYIPESKDQKQKIIEEFGEGYFILKDGVYEWVN | |
| | AGKLKIKKGSSKQSSSELVDSDILKDSFDLASELKGEKLM | |
| | LYRDPSGNVFPSDKWMAAGVFFGKLERILISKLTNQYSIS | |
| | TIEDDSSKQSM | |

[0341] G. Cas9 Equivalents

[0342] In some embodiments, the prime editors described herein can include any Cas9 equivalent. As used herein, the term “Cas9 equivalent” is a broad term that encompasses any napDNAbp protein that serves the same function as Cas9 in the present prime editors despite that its amino acid primary sequence and/or its three-dimensional structure may be different and/or unrelated from an evolutionary standpoint. Thus, while Cas9 equivalents include any Cas9 ortholog, homolog, mutant, or variant described or embraced herein that are evolutionarily related, the Cas9 equivalents also embrace proteins that may have evolved through convergent evolution processes to have the same or similar function as Cas9, but which do not necessarily have any similarity with regard to amino acid sequence and/or three dimensional structure. The prime editors described here embrace any Cas9 equivalent that would provide the same or similar function as Cas9 despite that the Cas9 equivalent may be based on a protein that arose through convergent evolution. For instance, if Cas9 refers to a type II enzyme of the CRISPR-Cas system, a Cas9 equivalent can refer to a type V or type VI enzyme of the CRISPR-Cas system.

[0343] For example, Cas12e (CasX) is a Cas9 equivalent that reportedly has the same function as Cas9 but which evolved through convergent evolution. Thus, the Cas12e (CasX) protein described in Liu et al., “CasX enzymes comprises a distinct family of RNA-guided genome editors,” Nature, 2019, Vol. 566: 218-223, is contemplated to be used with the prime editors described herein. In addition, any variant or modification of Cas12e (CasX) is conceivable and within the scope of the present disclosure.

[0344] Cas9 is a bacterial enzyme that evolved in a wide variety of species. However, the Cas9 equivalents contemplated herein may also be obtained from archaea, which constitute a domain and kingdom of single-celled prokaryotic microbes different from bacteria.

[0345] In some embodiments, Cas9 equivalents may refer to Cas12e (CasX) or Cas12d (CasY), which have been described in, for example, Burstein et al., “New CRISPR-Cas systems from uncultivated microbes.” Cell Res. 2017 Feb. 21. doi: 10.1038/cr.2017.21, the entire contents of which is hereby incorporated by reference. Using genome-resolved metagenomics, a number of CRISPR-Cas systems were identified, including the first reported Cas9 in the archaeal domain of life. This divergent Cas9 protein was found in little-studied nanoarchaea as part of an active CRISPR-Cas system. In bacteria, two previously unknown systems were discovered, CRISPR-Cas12e and CRISPR-Cas12d, which are among the most compact systems yet discovered. In some embodiments, Cas9 refers to Cas12e, or a variant of Cas12e. In some embodiments, Cas9 refers to a Cas12d, or a variant of Cas12d. It should be appreciated that other RNA-guided DNA binding proteins may be used as a nucleic acid programmable DNA binding protein (napDNAbp), and are within the scope of this disclosure. Also see Liu et al., “CasX enzymes comprises a distinct family of RNA-guided genome editors,” Nature, 2019, Vol. 566: 218-223. Any of these Cas9 equivalents are contemplated.

[0346] In some embodiments, the Cas9 equivalent comprises an amino acid sequence that is at least 85%, at least 90%, at least 91%, at least 92%, at least 93%, at least 94%, at least 95%, at least 96%, at least 97%, at least 98%, at least 99%, or at least 99.5% identical to a naturally-occurring Cas12e (CasX) or Cas12d (CasY) protein. In some embodiments, the napDNAbp is a naturally-occurring Cas12e (CasX) or Cas12d (CasY) protein. In some embodiments, the napDNAbp comprises an amino acid sequence that is at least 85%, at least 90%, at least 91%, at least 92%, at least 93%, at least 94%, at least 95%, at least 96%, at least 97%, at least 98%, at least 99%, or at least 99.5% identical to a wild-type Cas moiety or any Cas moiety provided herein.

[0347] In various embodiments, the nucleic acid programmable DNA binding proteins include, without limitation, Cas9 (e.g., dCas9 and nCas9), Cas12e (CasX), Cas12d (CasY), Cas12a (Cpf1), Cas12b1 (C2c1), Cas13a (C2c2), Cas12c (C2c3), Argonaute, and Cas12b1. One example of a nucleic acid programmable DNA-binding protein that has different PAM specificity than Cas9 is Clustered Regularly Interspaced Short Palindromic Repeats from Prevotella and Francisella 1 (i.e, Cas12a (Cpf1)). Similar to Cas9, Cas12a (Cpf1) is also a Class 2 CRISPR effector, but it is a member of type V subgroup of enzymes, rather than the type II subgroup. It has been shown that Cas12a (Cpf1) mediates robust DNA interference with features distinct from Cas9. Cas12a (Cpf1) is a single RNA-guided endonuclease lacking tracrRNA, and it utilizes a T-rich protospacer-adjacent motif (TTN, TTTN, or YTN). Moreover, Cpf1 cleaves DNA via a staggered DNA double-stranded break. Out of 16 Cpf1-family proteins, two enzymes from Acidaminococcus and Lachnospiraceae are shown to have efficient genome-editing activity in human cells. Cpf1 proteins are known in the art and have been described previously, for example Yamano et al., “Crystal structure of Cpf1 in complex with guide RNA and target DNA.” Cell (165) 2016, p. 949-962; the entire contents of which is hereby incorporated by reference.

[0348] In still other embodiments, the Cas protein may include any CRISPR associated protein, including but not limited to, Cas12a, Cas12b1, Cas1, Cas1B, Cas2, Cas3, Cas4, Cas5, Cas6, Cas7, Cas8, Cas9 (also known as Csn1 and Csx12), Cas10, Csy1, Csy2, Csy3, Cse1, Cse2, Csc1, Csc2, Csa5, Csn2, Csm2, Csm3, Csm4, Csm5, Csm6, Cmr1, Cmr3, Cmr4, Cmr5, Cmr6, Csb1, Csb2, Csb3, Csx17, Csx14, Csx10, Csx16, CsaX, Csx3, Csx1, Csx15, Csf1, Csf2, Csf3, Csf4, homologs thereof, or modified versions thereof, and preferably comprising a nickase mutation (e.g., a mutation corresponding to the D10A mutation of the wild type Cas9 polypeptide of SEQ ID NO: 18).

[0349] In various other embodiments, the napDNAbp can be any of the following proteins: a Cas9, a Cas12a (Cpf1), a Cas12e (CasX), a Cas12d (CasY), a Cas12b1 (C2c1), a Cas13a (C2c2), a Cas12c (C2c3), a GeoCas9, a CjCas9, a Cas12g, a Cas12h, a Cas12i, a Cas13b, a Cas13c, a Cas13d, a Cas14, a Csn2, an xCas9, an SpCas9-NG, a circularly permuted Cas9, or an Argonaute (Ago) domain, or a variant thereof.

[0350] Exemplary Cas9 equivalent protein sequences can include the following:

| Description | Sequence |
|---|---|
| AsCas12a | MTQFEGFTNLYQVSKTLRFELIPQGKTLKHIQEQGFIEEDKARNDHYKEL |
| previously | KPIIDRIYKTYADQCLQLVQLDWENLSAAIDSYRKEKTEETRNALIEEQA |
| known as | TYRNAIHDYFIGRTDNLTDAINKRHAEIYKGLFKAELFNGKVLKQLGTV |
| Cpf1) | TTTEHENALLRSFDKFTTYFSGFYENRKNVFSAEDISTAIPHRIVQDNFPK |
| Acidaminococcus | FKENCHIFTRLITAVPSLREHFENVKKAIGIFVSTSIEEVFSFPFYNQLLTQ |
| sp. | TQIDLYNQLLGGISREAGTEKIKGLNEVLNLAIQKNDETAHIIASLPHRFIP |
| (strain | LFKQILSDRNTLSFILEEFKSDEEVIQSFCKYKTLLRNENVLETAEALFNE |
| BV3L6) | LNSIDLTHIFISHKKLETISSALCDHWDTLRNALYERRISELTGKITKSAKE |
| UniProtKB | KVQRSLKHEDINLQEIISAAGKELSEAFKQKTSEILSHAHAALDQPLPTTL |
| U2UMQ6 | KKQEEKEILKSQLDSLLGLYHLLDWFAVDESNEVDPEFSARLTGIKLEM |
| | EPSLSFYNKARNYATKKPYSVEKFKLNFQMPTLASGWDVNKEKNNGAI |
| | LFVKNGLYYLGIMPKQKGRYKALSFEPTEKTSEGFDKMYYDYFPDAAK |
| | MIPKCSTQLKAVTAHFQTHTTPILLSNNFIEPLEITKEIYDLNNPEKEPKKF |
| | QTAYAKKTGDQKGYREALCKWIDFTRDFLSKYTKTTSIDLSSLRPSSQY |
| | KDLGEYYAELNPLLYHISFQRIAEKEIMDAVETGKLYLFQIYNKDFAKG |
| | HHGKPNLHTLYWTGLFSPENLAKTSIKLNGQAELFYRPKSRMKRMAHR |
| | LGEKMLNKKLKDQKTPIPDTLYQELYDYVNHRLSHDLSDEARALLPNVI |
| | TKEVSHEIIKDRRFTSDKFFFHVPITLNYQAANSPSKFNQRVNAYLKEHP |
| | ETPIIGIDRGERNLIYITVIDSTGKILEQRSLNTIQQFDYQKKLDNREKERV |
| | AARQAWSVVGTIKDLKQGYLSQVIHEIVDLMIHYQAVVVLENLNFGFK |
| | SKRTGIAEKAVYQQFEKMLIDKLNCLVLKDYPAEKVGGVLNPYQLTDQ |
| | FTSFAKMGTQSGFLFYVPAPYTSKIDPLTGFVDPFVWKTIKNHESRKHFL |
| | EGFDFLHYDVKTGDFILHFKMNRNLSFQRGLPGFMPAWDIVFEKNETQF |
| | DAKGTPFIAGKRIVPVIENHRFTGRYRDLYPANELIALLEEKGIVFRDGSN |
| | ILPKLLENDDSHAIDTMVALIRSVLQMRNSNAATGEDYINSPVRDLNGV |
| | CFDSRFQNPEWPMDADANGAYHIALKGQLLLNHLKESKDLKLQNGISN |
| | QDWLAYIQELRN (SEQ ID NO: 64) |
| AsCas12a | MTQFEGFTNLYQVSKTLRFELIPQGKTLKHIQEQGFIEEDKARNDHYKEL |
| nickase | KPIIDRIYKTYADQCLQLVQLDWENLSAAIDSYRKEKTEETRNALIEEQA |
| (e.g., | TYRNAIHDYFIGRTDNLTDAINKRHAEIYKGLFKAELFNGKVLKQLGTV |
| R1226A) | TTTEHENALLRSFDKFTTYFSGFYENRKNVFSAEDISTAIPHRIVQDNFPK |
| | FKENCHIFTRLITAVPSLREHFENVKKAIGIFVSTSIEEVFSFPFYNQLLTQ |
| | TQIDLYNQLLGGISREAGTEKIKGLNEVLNLAIQKNDETAHIIASLPHRFIP |
| | LFKQILSDRNTLSFILEEFKSDEEVIQSFCKYKTLLRNENVLETAEALFNE |
| | LNSIDLTHIFISHKKLETISSALCDHWDTLRNALYERRISELTGKITKSAKE |
| | KVQRSLKHEDINLQEIISAAGKELSEAFKQKTSEILSHAHAALDQPLPTTL |
| | KKQEEKEILKSQLDSLLGLYHLLDWFAVDESNEVDPEFSARLTGIKLEM |
| | EPSLSFYNKARNYATKKPYSVEKFKLNFQMPTLASGWDVNKEKNNGAI |
| | LFVKNGLYYLGIMPKQKGRYKALSFEPTEKTSEGFDKMYYDYFPDAAK |
| | MIPKCSTQLKAVTAHFQTHTTPILLSNNFIEPLEITKEIYDLNNPEKEPKKF |
| | QTAYAKKTGDQKGYREALCKWIDFTRDFLSKYTKTTSIDLSSLRPSSQY |
| | KDLGEYYAELNPLLYHISFQRIAEKEIMDAVETGKLYLFQIYNKDFAKG |
| | HHGKPNLHTLYWTGLFSPENLAKTSIKLNGQAELFYRPKSRMKRMAHR |
| | LGEKMLNKKLKDQKTPIPDTLYQELYDYVNHRLSHDLSDEARALLPNVI |
| | TKEVSHEIIKDRRFTSDKFFFHVPITLNYQAANSPSKFNQRVNAYLKEHP |
| | ETPIIGIDRGERNLIYITVIDSTGKILEQRSLNTIQQFDYQKKLDNREKERV |
| | AARQAWSVVGTIKDLKQGYLSQVIHEIVDLMIHYQAVVVLENLNFGFK |
| | SKRTGIAEKAVYQQFEKMLIDKLNCLVLKDYPAEKVGGVLNPYQLTDQ |
| | FTSFAKMGTQSGFLFYVPAPYTSKIDPLTGFVDPFVWKTIKNHESRKHFL |
| | EGFDFLHYDVKTGDFILHFKMNRNLSFQRGLPGFMPAWDIVFEKNETQF |
| | DAKGTPFIAGKRIVPVIENHRFTGRYRDLYPANELIALLEEKGIVFRDGSN |
| | ILPKLLENDDSHAIDTMVALIRSVLQMANSNAATGEDYINSPVRDLNGV |
| | CFDSRFQNPEWPMDADANGAYHIALKGQLLLNHLKESKDLKLQNGISN |
| | QDWLAYIQELRN (SEQ ID NO: 65) |
| LbCas12a | MNYKTGLEDFIGKESLSKTLRNALIPTESTKIHMEEMGVIRDDELRAEKQ |
| (previously | QELKEIMDDYYRTFIEEKLGQIQGIQWNSLFQKMEETMEDISVRKDLDKI |
| known as | QNEKRKEICCYFTSDKRFKDLFNAKLITDILPNFIKDNKEYTEEEKAEKE |
| Cpf1) | QTRVLFQRFATAFTNYFNQRRNNFSEDNISTAISFRIVNENSEIHLQNMR |
| Lachnospiraceae | AFQRIEQQYPEEVCGMEEEYKDMLQEWQMKHIYSVDFYDRELTQPGIE |
| bacterium | YYNGICGKINEHMNQFCQKNRINKNDFRMKKLHKQILCKKSSYYEIPFR |
| GAM79 | FESDQEVYDALNEFIKTMKKKEIIRRCVHLGQECDDYDLGKIYISSNKYE |
| Ref Seq. | QISNALYGSWDTIRKCIKEEYMDALPGKGEKKEEKAEAAAKKEEYRSIA |
| WP_119623382.1 | DIDKIISLYGSEMDRTISAKKCITEICDMAGQISIDPLVCNSDIKLLQNKEK |
| | TTEIKTILDSFLHVYQWGQTFIVSDIIEKDSYFYSELEDVLEDFEGITTLYN |
| | HVRSYVTQKPYSTVKFKLHFGSPTLANGWSQSKEYDNNAILLMRDQKF |
| | YLGIFNVRNKPDKQIIKGHEKEEKGDYKKMIYNLLPGPSKMLPKVFITSR |
| | SGQETYKPSKHILDGYNEKRHIKSSPKFDLGYCWDLIDYYKECIHKHPD |
| | WKNYDFHFSDTKDYEDISGFYREVEMQGYQIKWTYISADEIQKLDEKG |
| | QIFLFQIYNKDFSVHSTGKDNLHTMYLKNLFSEENLKDIVLKLNGEAELF |
| | FRKASIKTPIVHKKGSVLVNRSYTQTVGNKEIRVSIPEEYYTEIYNYLNHI |
| | GKGKLSSEAQRYLDEGKIKSFTATKDIVKNYRYCCDHYFLHLPITINFKA |
| | KSDVAVNERTLAYIAKKEDIHIIGIDRGERNLLYISVVDVHGNIREQRSFN |
| | IVNGYDYQQKLKDREKSRDAARKNWEEIEKIKELKEGYLSMVIHYIAQL |
| | VVKYNAVVAMEDLNYGFKTGRFKVERQVYQKFETMLIEKLHYLVFKD |
| | REVCEEGGVLRGYQLTYIPESLKKVGKQCGFIFYVPAGYTSKIDPTTGFV |
| | NLFSFKNLTNRESRQDFVGKFDEIRYDRDKKMFEFSFDYNNYIKKGTILA |
| | STKWKVYTNGTRLKRIVVNGKYTSQSMEVELTDAMEKMLQRAGIEYH |
| | DGKDLKGQIVEKGIEAEIIDIFRLTVQMRNSRSESEDREYDRLISPVLNDK |
| | EFFDTATADKTLPQDADANGAYCIALKGLYEVKQIKENWKENEQFPR |
| | NKLVQDNKTWFDFMQKKRYL (SEQ ID NO: 66) |
| PcCas12a - | MAKNFEDFKRLYSLSKTLRFEAKPIGATLDNIVKSGLLDEDEHRAASYV |
| previously | KVKKLIDEYHKVFIDRVLDDGCLPLENKGNNNSLAEYYESYVSRAQDE |
| known at | DAKKKFKEIQQNLRSVIAKKLTEDKAYANLFGNKLIESYKDKEDKKKII |
| Cpf1 | DSDLIQFINTAESTQLDSMSQDEAKELVKEFWGFVTYFYGFFDNRKNMY |
| Prevotella | TAEEKSTGIAYRLVNENLPKFIDNIEAFNRAITRPEIQENMGVLYSDFSEY |
| copri | LNVESIQEMFQLDYYNMLLTQKQIDVYNAIIGGKTDDEHDVKIKGINEYI |
| Ref Seq. | NLYNQQHKDDKLPKLKALFKQILSDRNAISWLPEEFNSDQEVLNAIKDC |
| WP_119227726.1 | YERLAENVLGDKVLKSLLGSLADYSLDGIFIRNDLQLTDISQKMFGNWG |
| | VIQNAIMQNIKRVAPARKHKESEEDYEKRIAGIFKKADSFSISYINDCLNE |
| | ADPNNAYFVENYFATFGAVNTPTMQRENLFALVQNAYTEVAALLHSDY |
| | PTVKHLAQDKANVSKIKALLDAIKSLQHFVKPLLGKGDESDKDERFYGE |
| | LASLWAELDTVTPLYNMIRNYMTRKPYSQKKIKLNFENPQLLGGWDAN |
| | KEKDYATIILRRNGLYYLAIMDKDSRKLLGKAMPSDGECYEKMVYKFF |
| | KDVTTMIPKCSTQLKDVQAYFKVNTDDYVLNSKAFNKPLTITKEVFDLN |
| | NVLYGKYKKFQKGYLTATGDNVGYTHAVNVWIKFCMDFLNSYDSTCI |
| | YDFSSLKPESYLSLDAFYQDANLLLYKLSFARASVSYINQLVEEGKMYL |
| | FQIYNKDFSEYSKGTPNMHTLYWKALFDERNLADVVYKLNGQAEMFY |
| | RKKSIENTHPTHPANHPILNKNKDNKKKESLFDYDLIKDRRYTVDKFMF |
| | HVPITMNFKSVGSENINQDVKAYLRHADDMHIIGIDRGERHLLYLVVIDL |
| | QGNIKEQYSLNEIVNEYNGNTYHTNYHDLLDVREEERLKARQSWQTIEN |
| | IKELKEGYLSQVIHKITQLMVRYHAIVVLEDLSKGFMRSRQKVEKQVYQ |
| | KFEKMLIDKLNYLVDKKTDVSTPGGLLNAYQLTCKSDSSQKLGKQSGF |
| | LFYIPAWNTSKIDPVTGFVNLLDTHSLNSKEKIKAFFSKFDAIRYNKDKK |
| | WFEFNLDYDKFGKKAEDTRTKWTLCTRGMRIDTFRNKEKNSQWDNQE |
| | VDLTTEMKSLLEHYYIDIHGNLKDAISAQTDKAFFTGLLHILKLTLQMRN |
| | SITGTETDYLVSPVADENGIFYDSRSCGNQLPENADANGAYNIARKGLM |
| | LIEQIKNAEDLNNVKFDISNKAWLNFAQQKPYKNG (SEQ ID NO: 67) |
| ErCas 12a - | MFSAKLISDILPEFVIHNNNYSASEKEEKTQVIKLFSRFATSFKDYFKNRA |
| previously | NCFSANDISSSSCHRIVNDNAEIFFSNALVYRRIVKNLSNDDINKISGDMK |
| known at | DSLKEMSLEEIYSYEKYGEFITQEGISFYNDICGKVNLFMNLYCQKNKEN |
| Cpf1 | KNLYKLRKLHKQILCIADTSYEVPYKFESDEEVYQSVNGFLDNISSKHIV |
| Eubacterium | ERLRKIGENYNGYNLDKIYIVSKFYESVSQKTYRDWETINTALEIHYNNI |
| rectale | LPGNGKSKADKVKKAVKNDLQKSITEINELVSNYKLCPDDNIKAETYIH |
| Ref Seq. | EISHILNNFEAQELKYNPEIHLVESELKASELKNVLDVIMNAFHWCSVFM |
| WP 119223642.1 | TEELVDKDNNFYAELEEIYDEIYPVISLYNLVRNYVTQKPYSTKKIKLNF |
| | GIPTLADGWSKSKEYSNNAIILMRDNLYYLGIFNAKNKPDKKIIEGNTSE |
| | NKGDYKKMIYNLLPGPNKMIPKVFLSSKTGVETYKPSAYILEGYKQNKH |
| | LKSSKDFDITFCHDLIDYFKNCIAIHPEWKNFGFDFSDTSTYEDISGFYRE |
| | VELQGYKIDWTYISEKDIDLLQEKGQLYLFQIYNKDFSKKSSGNDNLHT |
| | MYLKNLFSEENLKDIVLKLNGEAEIFFRKSSIKNPIIHKKGSILVNRTYEA |
| | EEKDQFGNIQIVRKTIPENIYQELYKYFNDKSDKELSDEAAKLKNVVGH |
| | HEAATNIVKDYRYTYDKYFLHMPITINFKANKTSFINDRILQYIAKEKDL |
| | HVIGIDRGERNLIYVSVIDTCGNIVEQKSFNIVNGYDYQIKLKQQEGARQI |
| | ARKEWKEIGKIKEIKEGYLSLVIHEISKMVIKYNAIIAMEDLSYGFKKGRF |
| | KVERQVYQKFETMLINKLNYLVFKDISITENGGLLKGYQLTYIPDKLKN |
| | VGHQCGCIFYVPAAYTSKIDPTTGFVNIFKFKDLTVDAKREFIKKFDSIRY |
| | DSDKNLFCFTFDYNNFITQNTVMSKSSWSVYTYGVRIKRRFVNGRFSNE |
| | SDTIDITKDMEKTLEMTDINWRDGHDLRQDIIDYEIVQHIFEIFKLTVQM |
| | RNSLSELEDRDYDRLISPVLNENNIFYDSAKAGDALPKDADANGAYCIA |
| | LKGLYEIKQITENWKEDGKFSRDKLKISNKDWFDFIQNKRYL (SEQ ID |
| | NO: 68) |
| CsCas12a - | MNYKTGLEDFIGKESLSKTLRNALIPTESTKIHMEEMGVIRDDELRAEKQ |
| previously | QELKEIMDDYYRAFIEEKLGQIQGIQWNSLFQKMEETMEDISVRKDLDKI |
| known at | QNEKRKEICCYFTSDKRFKDLFNAKLITDILPNFIKDNKEYTEEEKAEKE |
| Cpf1 | QTRVLFQRFATAFTNYFNQRRNNFSEDNISTAISFRIVNENSEIHLQNMR |
| Clostridium | AFQRIEQQYPEEVCGMEEEYKDMLQEWQMKHIYLVDFYDRVLTQPGIE |
| sp. AF34- | YYNGICGKINEHMNQFCQKNRINKNDFRMKKLHKQILCKKSSYYEIPFR |
| 10BH | FESDQEVYDALNEFIKTMKEKEIICRCVHLGQKCDDYDLGKIYISSNKYE |
| Ref Seq. | QISNALYGSWDTIRKCIKEEYMDALPGKGEKKEEKAEAAAKKEEYRSIA |
| WP 118538418.1 | DIDKIISLYGSEMDRTISAKKCITEICDMAGQISTDPLVCNSDIKLLQNKE |
| | KTTEIKTILDSFLHVYQWGQTFIVSDIIEKDSYFYSELEDVLEDFEGITTLY |
| | NHVRSYVTQKPYSTVKFKLHFGSPTLANGWSQSKEYDNNAILLMRDQK |
| | FYLGIFNVRNKPDKQIIKGHEKEEKGDYKKMIYNLLPGPSKMLPKVFITS |
| | RSGQETYKPSKHILDGYNEKRHIKSSPKFDLGYCWDLIDYYKECIHKHP |
| | DWKNYDFHFSDTKDYEDISGFYREVEMQGYQIKWTYISADEIQKLDEK |
| | GQIFLFQIYNKDFSVHSTGKDNLHTMYLKNLFSEENLKDIVLKLNGEAEL |
| | FFRKASIKTPVVHKKGSVLVNRSYTQTVGDKEIRVSIPEEYYTEIYNYLN |
| | HIGRGKLSTEAQRYLEERKIKSFTATKDIVKNYRYCCDHYFLHLPITINFK |
| | AKSDIAVNERTLAYIAKKEDIHIIGIDRGERNLLYISVVDVHGNIREQRSF |
| | NIVNGYDYQQKLKDREKSRDAARKNWEEIEKIKELKEGYLSMVIHYIAQ |
| | LVVKYNAVVAMEDLNYGFKTGRFKVERQVYQKFETMLIEKLHYLVFK |
| | DREVCEEGGVLRGYQLTYIPESLKKVGKQCGFIFYVPAGYTSKIDPTTGF |
| | VNLFSFKNLTNRESRQDFVGKFDEIRYDRDKKMFEFSFDYNNYIKKGTM |
| | LASTKWKVYTNGTRLKRIVVNGKYTSQSMEVELTDAMEKMLQRAGIE |
| | YHDGKDLKGQIVEKGIEAEIIDIFRLTVQMRNSRSESEDREYDRLISPVLN |
| | DKGEFFDTATADKTLPQDADANGAYCIALKGLYEVKQIKENWKENEQF |
| | PRNKLVQDNKTWFDFMQKKRYL (SEQ ID NO: 69) |
| BhCas12b | MATRSFILKIEPNEEVKKGLWKTHEVLNHGIAYYMNILKLIRQEAIYEHH |
| Bacillus | EQDPKNPKKVSKAEIQAELWDFVLKMQKCNSFTHEVDKDEVFNILREL |
| hisashii | YEELVPSSVEKKGEANQLSNKFLYPLVDPNSQSGKGTASSGRKPRWYNL |
| Ref Seq. | KIAGDPSWEEEKKKWEEDKKKDPLAKILGKLAEYGLIPLFIPYTDSNEPI |
| WP 095142515.1 | VKEIKWMEKSRNQSVRRLDKDMFIQALERFLSWESWNLKVKEEYEKVE |
| | KEYKTLEERIKEDIQALKALEQYEKERQEQLLRDTLNTNEYRLSKRGLR |
| | GWREIIQKWLKMDENEPSEKYLEVFKDYQRKHPREAGDYSVYEFLSKK |
| | ENHFIWRNHPEYPYLYATFCEIDKKKKDAKQQATFTLADPINHPLWVRF |
| | EERSGSNLNKYRILTEQLHTEKLKKKLTVQLDRLIYPTESGGWEEKGKV |
| | DIVLLPSRQFYNQIFLDIEEKGKHAFTYKDESIKFPLKGTLGGARVQFDR |
| | DHLRRYPHKVESGNVGRIYFNMTVNIEPTESPVSKSLKIHRDDFPKVVNF |
| | KPKELTEWIKDSKGKKLKSGIESLEIGLRVMSIDLGQRQAAAASIFEVVD |
| | QKPDIEGKLFFPIKGTELYAVHRASFNIKLPGETLVKSREVLRKAREDNL |
| | KLMNQKLNFLRNVLHFQQFEDITEREKRVTKWISRQENSDVPLVYQDEL |
| | IQIRELMYKPYKDWVAFLKQLHKRLEVEIGKEVKHWRKSLSDGRKGLY |
| | GISLKNIDEIDRTRKFLLRWSLRPTEPGEVRRLEPGQRFAIDQLNHLNALK |
| | EDRLKKMANTIIMHALGYCYDVRKKKWQAKNPACQIILFEDLSNYNPY |
| | EERSRFENSKLMKWSRREIPRQVALQGEIYGLQVGEVGAQFSSRFHAKT |
| | GSPGIRCSVVTKEKLQDNRFFKNLQREGRLTLDKIAVLKEGDLYPDKGG |
| | EKFISLSKDRKCVTTHADINAAQNLQKRFWTRTHGFYKVYCKAYQVDG |
| | QTVYIPESKDQKQKIIEEFGEGYFILKDGVYEWVNAGKLKIKKGSSKQSS |
| | SELVDSDILKDSFDLASELKGEKLMLYRDPSGNVFPSDKWMAAGVFFG |
| | KLERILISKLTNQYSISTIEDDSSKQSM (SEQ ID NO: 70) |
| ThCas12b | MSEKTTQRAYTLRLNRASGECAVCQNNSCDCWHDALWATHKAVNRG |
| Thermomonas | AKAFGDWLLTLRGGLCHTLVEMEVPAKGNNPPQRPTDQERRDRRVLLA |
| hydrothermalis | LSWLSVEDEHGAPKEFIVATGRDSADDRAKKVEEKLREILEKRDFQEHEI |
| Ref Seq. | DAWLQDCGPSLKAHIREDAVWVNRRALFDAAVERIKTLTWEEAWDFL |
| WP_072754838 | EPFFGTQYFAGIGDGKDKDDAEGPARQGEKAKDLVQKAGQWLSARFGI |
| | GTGADFMSMAEAYEKIAKWASQAQNGDNGKATIEKLACALRPSEPPTL |
| | DTVLKCISGPGHKSATREYLKTLDKKSTVTQEDLNQLRKLADEDARNC |
| | RKKVGKKGKKPWADEVLKDVENSCELTYLQDNSPARHREFSVMLDHA |
| | ARRVSMAHSWIKKAEQRRRQFESDAQKLKNLQERAPSAVEWLDRFCES |
| | RSMTTGANTGSGYRIRKRAIEGWSYVVQAWAEASCDTEDKRIAAARKV |
| | QADPEIEKFGDIQLFEALAADEAICVWRDQEGTQNPSILIDYVTGKTAEH |
| | NQKRFKVPAYRHPDELRHPVFCDFGNSRWSIQFAIHKEIRDRDKGAKQD |
| | TRQLQNRHGLKMRLWNGRSMTDVNLHWSSKRLTADLALDQNPNPNPT |
| | EVTRADRLGRAASSAFDHVKIKNVFNEKEWNGRLQAPRAELDRIAKLE |
| | EQGKTEQAEKLRKRLRWYVSFSPCLSPSGPFIVYAGQHNIQPKRSGQYA |
| | PHAQANKGRARLAQLILSRLPDLRILSVDLGHRFAAACAVWETLSSDAF |
| | RREIQGLNVLAGGSGEGDLFLHVEMTGDDGKRRTVVYRRIGPDQLLDN |
| | TPHPAPWARLDRQFLIKLQGEDEGVREASNEELWTVHKLEVEVGRTVP |
| | LIDRMVRSGFGKTEKQKERLKKLRELGWISAMPNEPSAETDEKEGEIRSI |
| | SRSVDELMSSALGTLRLALKRHGNRARIAFAMTADYKPMPGGQKYYFH |
| | EAKEASKNDDETKRRDNQIEFLQDALSLWHDLFSSPDWEDNEAKKLWQ |
| | NHIATLPNYQTPEEISAELKRVERNKKRKENRDKLRTAAKALAENDQLR |
| | QHLHDTWKERWESDDQQWKERLRSLKDWIFPRGKAEDNPSIRHVGGLS |
| | ITRINTISGLYQILKAFKMRPEPDDLRKNIPQKGDDELENFNRRLLEARDR |
| | LREQRVKQLASRIIEAALGVGRIKIPKNGKLPKRPRTTVDTPCHAVVIESL |
| | KTYRPDDLRTRRENRQLMQWSSAKVRKYLKEGCELYGLHFLEVPANYT |
| | SRQCSRTGLPGIRCDDVPTGDFLKAPWWRRAINTAREKNGGDAKDRFL |
| | VDLYDHLNNLQSKGEALPATVRVPRQGGNLFIAGAQLDDTNKERRAIQ |
| | ADLNAAANIGLRALLDPDWRGRWWYVPCKDGTSEPALDRIEGSTAFND |
| | VRSLPTGDNSSRRAPREIENLWRDPSGDSLESGTWSPTRAYWDTVQSRV |
| | IELLRRHAGLPTS (SEQ ID NO: 71) |
| LsCas12b | MSIRSFKLKLKTKSGVNAEQLRRGLWRTHQLINDGIAYYMNWLVLLRQ |
| Laceyella | EDLFIRNKETNEIEKRSKEEIQAVLLERVHKQQQRNQWSGEVDEQTLLQ |
| sacchari | ALRQLYEEIVPSVIGKSGNASLKARFFLGPLVDPNNKTTKDVSKSGPTPK |
| WP_132221894.1 | WKKMKDAGDPNWVQEYEKYMAERQTLVRLEEMGLIPLFPMYTDEVG |
| | DIHWLPQASGYTRTWDRDMFQQAIERLLSWESWNRRVRERRAQFEKKT |
| | HDFASRFSESDVQWMNKLREYEAQQEKSLEENAFAPNEPYALTKKALR |
| | GWERVYHSWMRLDSAASEEAYWQEVATCQTAMRGEFGDPAIYQFLAQ |
| | KENHDIWRGYPERVIDFAELNHLQRELRRAKEDATFTLPDSVDHPLWVR |
| | YEAPGGTNIHGYDLVQDTKRNLTLILDKFILPDENGSWHEVKKVPFSLA |
| | KSKQFHRQVWLQEEQKQKKREVVFYDYSTNLPHLGTLAGAKLQWDRN |
| | FLNKRTQQQIEETGEIGKVFFNISVDVRPAVEVKNGRLQNGLGKALTVL |
| | THPDGTKIVTGWKAEQLEKWVGESGRVSSLGLDSLSEGLRVMSIDLGQ |
| | RTSATVSVFEITKEAPDNPYKFFYQLEGTEMFAVHQRSFLLALPGENPPQ |
| | KIKQMREIRWKERNRIKQQVDQLSAILRLHKKVNEDERIQAIDKLLQKV |
| | ASWQLNEEIATAWNQALSQLYSKAKENDLQWNQAIKNAHHQLEPVVG |
| | KQISLWRKDLSTGRQGIAGLSLWSIEELEATKKLLTRWSKRSREPGVVK |
| | RIERFETFAKQIQHHINQVKENRLKQLANLIVMTALGYKYDQEQKKWIE |
| | VYPACQVVLFENLRSYRFSFERSRRENKKLMEWSHRSIPKLVQMQGELF |
| | GLQVADVYAAYSSRYHGRTGAPGIRCHALTEADLRNETNIIHELIEAGFI |
| | KEEHRPYLQQGDLVPWSGGELFATLQKPYDNPRILTLHADINAAQNIQK |
| | RFWHPSMWFRVNCESVMEGEIVTYVPKNKTVHKKQGKTFRFVKVEGS |
| | DVYEWAKWSKNRNKNTFSSITERKPPSSMILFRDPSGTFFKEQEWVEQK |
| | TFWGKVQSMIQAYMKKTIVQRMEE (SEQ ID NO: 72) |
| DtCas12b | MVLGRKDDTAELRRALWTTHEHVNLAVAEVERVLLRCRGRSYWTLDR |
| Dsulfonatronum | RGDPVHVPESQVAEDALAMAREAQRRNGWPVVGEDEEILLALRYLYEQ |
| thiodisrnutans | IVPSCLLDDLGKPLKGDAQKIGTNYAGPLFDSDTCRRDEGKDVACCGPF |
| WP_031386437 | HEVAGKYLGALPEWATPISKQEFDGKDASHLRFKATGGDDAFFRVSIEK |
| | ANAWYEDPANQDALKNKAYNKDDWKKEKDKGISSWAVKYIQKQLQL |
| | GQDPRTEVRRKLWLELGLLPLFIPVFDKTMVGNLWNRLAVRLALAHLL |
| | SWESWNHRAVQDQALARAKRDELAALFLGMEDGFAGLREYELRRNESI |
| | KQHAFEPVDRPYVVSGRALRSWTRVREEWLRHGDTQESRKNICNRLQD |
| | RLRGKFGDPDVFHWLAEDGQEALWKERDCVTSFSLLNDADGLLEKRK |
| | GYALMTFADARLHPRWAMYEAPGGSNLRTYQIRKTENGLWADVVLLS |
| | PRNESAAVEEKTFNVRLAPSGQLSNVSFDQIQKGSKMVGRCRYQSANQ |
| | QFEGLLGGAEILFDRKRIANEQHGATDLASKPGHVWFKLTLDVRPQAPQ |
| | GWLDGKGRPALPPEAKHFKTALSNKSKFADQVRPGLRVLSVDLGVRSF |
| | AACSVFELVRGGPDQGTYFPAADGRTVDDPEKLWAKHERSFKITLPGEN |
| | PSRKEEIARRAAMEELRSLNGDIRRLKAILRLSVLQEDDPRTEHLRLFME |
| | AIVDDPAKSALNAELFKGFGDDRFRSTPDLWKQHCHFFHDKAEKVVAE |
| | RFSRWRTETRPKSSSWQDWRERRGYAGGKSYWAVTYLEAVRGLILRW |
| | NMRGRTYGEVNRQDKKQFGTVASALLHHINQLKEDRIKTGADMIIQAA |
| | RGFVPRKNGAGWVQVHEPCRLILFEDLARYRFRTDRSRRENSRLMRWS |
| | HREIVNEVGMQGELYGLHVDTTEAGFSSRYLASSGAPGVRCRHLVEEDF |
| | HDGLPGMHLVGELDWLLPKDKDRTANEARRLLGGMVRPGMLVPWDG |
| | GELFATLNAASQLHVIHADINAAQNLQRRFWGRCGEAIRIVCNQLSVDG |
| | STRYEMAKAPKARLLGALQQLKNGDAPFHLTSIPNSQKPENSYVMTPTN |
| | AGKKYRAGPGEKSSGEEDELALDIVEQAEELAQGRKTFFRDPSGVFFAP |
| | DRWLPSEIYWSRIRRRIWQVTLERNSSGRQERAEMDEMPY (SEQ ID NO: |
| | 73) |

[0351] The prime editors described herein may also comprise Cas12a (Cpf1) (dCpf1) variants that may be used as a guide nucleotide sequence-programmable DNA-binding protein domain. The Cas12a (Cpf1) protein has a RuvC-like endonuclease domain that is similar to the RuvC domain of Cas9 but does not have a HNH endonuclease domain, and the N-terminal of Cas12a (Cpf1) does not have the alfa-helical recognition lobe of Cas9. It was shown in Zetsche et al., Cell, 163, 759-771, 2015 (which is incorporated herein by reference) that, the RuvC-like domain of Cas12a (Cpf1) is responsible for cleaving both DNA strands and inactivation of the RuvC-like domain inactivates Cas12a (Cpf1) nuclease activity.

[0352] In some embodiments, the napDNAbp is a single effector of a microbial CRISPR-Cas system. Single effectors of microbial CRISPR-Cas systems include, without limitation, Cas9, Cas12a (Cpf1), Cas12b1 (C2c1), Cas13a (C2c2), and Cas12c (C2c3). Typically, microbial CRISPR-Cas systems are divided into Class 1 and Class 2 systems. Class 1 systems have multisubunit effector complexes, while Class 2 systems have a single protein effector. For example, Cas9 and Cas12a (Cpf1) are Class 2 effectors. In addition to Cas9 and Cas12a (Cpf1), three distinct Class 2 CRISPR-Cas systems (Cas12b1, Cas13a, and Cas12c) have been described by Shmakov et al., “Discovery and Functional Characterization of Diverse Class 2 CRISPR Cas Systems”, Mol. Cell, 2015 Nov. 5; 60(3): 385-397, the entire contents of which are hereby incorporated by reference.

[0353] Effectors of two of the systems, Cas12b1 and Cas12c, contain RuvC-like endonuclease domains related to Cas12a. A third system, Cas13a contains an effector with two predicated HEPN RNase domains. Production of mature CRISPR RNA is tracrRNA-independent, unlike production of CRISPR RNA by Cas12b1. Cas12b1 depends on both CRISPR RNA and tracrRNA for DNA cleavage. Bacterial Cas13a has been shown to possess a unique RNase activity for CRISPR RNA maturation distinct from its RNA-activated single-stranded RNA degradation activity. These RNase functions are different from each other and from the CRISPR RNA-processing behavior of Cas12a. See, e.g., East-Seletsky, et al., “Two distinct RNase activities of CRISPR-Cas13a enable guide-RNA processing and RNA detection”, Nature, 2016 Oct. 13; 538(7624):270-273, the entire contents of which are hereby incorporated by reference. In vitro biochemical analysis of Cas13a in Leptotrichia shahii has shown that Cas13a is guided by a single CRISPR RNA and can be programed to cleave ssRNA targets carrying complementary protospacers. Catalytic residues in the two conserved HEPN domains mediate cleavage. Mutations in the catalytic residues generate catalytically inactive RNA-binding proteins. See e.g., Abudayyeh et al., “C2c2 is a single-component programmable RNA-guided RNA-targeting CRISPR effector”, Science, 2016 Aug. 5; 353(6299), the entire contents of which are hereby incorporated by reference.

[0354] The crystal structure of Alicyclobaccillus acidoterrastris Cas12b1 (AacC2c1) has been reported in complex with a chimeric single-molecule guide RNA (sgRNA). See e.g., Liu et al., “C2c1-sgRNA Complex Structure Reveals RNA-Guided DNA Cleavage Mechanism”, Mol. Cell, 2017 Jan. 19; 65(2):310-322, the entire contents of which are hereby incorporated by reference. The crystal structure has also been reported in Alicyclobacillus acidoterrestris C2c1 bound to target DNAs as ternary complexes. See e.g., Yang et al., “PAM-dependent Target DNA Recognition and Cleavage by C2C1 CRISPR-Cas endonuclease”, Cell, 2016 Dec. 15; 167(7):1814-1828, the entire contents of which are hereby incorporated by reference. Catalytically competent conformations of AacC2c1, both with target and non-target DNA strands, have been captured independently positioned within a single RuvC catalytic pocket, with C2c1-mediated cleavage resulting in a staggered seven-nucleotide break of target DNA. Structural comparisons between C2c1 ternary complexes and previously identified Cas9 and Cpf1 counterparts demonstrate the diversity of mechanisms used by CRISPR-Cas9 systems.

[0355] In some embodiments, the napDNAbp may be a C2c1, a C2c2, or a C2c3 protein. In some embodiments, the napDNAbp is a C2c1 protein. In some embodiments, the napDNAbp is a Cas13a protein. In some embodiments, the napDNAbp is a Cas12c protein. In some embodiments, the napDNAbp comprises an amino acid sequence that is at least 85%, at least 90%, at least 91%, at least 92%, at least 93%, at least 94%, at least 95%, at least 96%, at least 97%, at least 98%, at least 99%, or at least 99.5% identical to a naturally-occurring Cas12b1 (C2c1), Cas13a (C2c2), or Cas12c (C2c3) protein. In some embodiments, the napDNAbp is a naturally-occurring Cas12b1 (C2c1), Cas13a (C2c2), or Cas12c (C2c3) protein.

[0356] H. Cas9 Circular Permutants

[0357] In various embodiments, the prime editors disclosed herein may comprise a circular permutant of Cas9.

[0358] The term “circularly permuted Cas9” or “circular permutant” of Cas9 or “CP-Cas9”) refers to any Cas9 protein, or variant thereof, that occurs or has been modify to engineered as a circular permutant variant, which means the N-terminus and the C-terminus of a Cas9 protein (e.g., a wild type Cas9 protein) have been topically rearranged. Such circularly permuted Cas9 proteins, or variants thereof, retain the ability to bind DNA when complexed with a guide RNA (gRNA). See, Oakes et al., “Protein Engineering of Cas9 for enhanced function,” Methods Enzymol, 2014, 546: 491-511 and Oakes et al., “CRISPR-Cas9 Circular Permutants as Programmable Scaffolds for Genome Modification,” Cell, Jan. 10, 2019, 176: 254-267, each of are incorporated herein by reference. The instant disclosure contemplates any previously known CP-Cas9 or use a new CP-Cas9 so long as the resulting circularly permuted protein retains the ability to bind DNA when complexed with a guide RNA (gRNA).

[0359] Any of the Cas9 proteins described herein, including any variant, ortholog, or naturally occurring Cas9 or equivalent thereof, may be reconfigured as a circular permutant variant.

[0360] In various embodiments, the circular permutants of Cas9 may have the following structure:
[0361] N-terminus-[original C-terminus]-[optional linker]-[original N-terminus]-C-terminus.

[0362] As an example, the present disclosure contemplates the following circular permutants of canonical S. pyogenes Cas9 (1368 amino acids of UniProtKB—Q99ZW2 (CAS9_STRP1) (numbering is based on the amino acid position in SEQ ID NO: 18)): N-terminus-[1268-1368]-[optional linker]-[1-1267]-C-terminus; N-terminus-[1168-1368]-[optional linker]-[1-1167]-C-terminus; N-terminus-[1068-1368]-[optional linker]-[1-1067]-C-terminus; N-terminus-[968-1368]-[optional linker]-[1-967]-C-terminus; N-terminus-[868-1368]-[optional linker]-[1-867]-C-terminus; N-terminus-[768-1368]-[optional linker]-[1-767]-C-terminus; N-terminus-[668-1368]-[optional linker]-[1-667]-C-terminus; N-terminus-[568-1368]-[optional linker]-[1-567]-C-terminus; N-terminus-[468-1368]-[optional linker]-[1-467]-C-terminus; N-terminus-[368-1368]-[optional linker]-[1-367]-C-terminus; N-terminus-[268-1368]-[optional linker]-[1-267]-C-terminus; N-terminus-[168-1368]-[optional linker]-[1-167]-C-terminus; N-terminus-[68-1368]-[optional linker]-[1-67]-C-terminus; or N-terminus-[10-1368]-[optional linker]-[1-9]-C-terminus, or the corresponding circular permutants of other Cas9 proteins (including other Cas9 orthologs, variants, etc).

[0363] In particular embodiments, the circular permuant Cas9 has the following structure (based on S. pyogenes Cas9 (1368 amino acids of UniProtKB—Q99ZW2 (CAS9_STRP1) (numbering is based on the amino acid position in SEQ ID NO: 18): N-terminus-[102-1368]-[optional linker]-[1-101]-C-terminus; N-terminus-[1028-1368]-[optional linker]-[1-1027]-C-terminus; N-terminus-[1041-1368]-[optional linker]-[1-1043]-C-terminus; N-terminus-[1249-1368]-[optional linker]-[1-1248]-C-terminus; or N-terminus-[1300-1368]-[optional linker]-[1-1299]-C-terminus, or the corresponding circular permutants of other Cas9 proteins (including other Cas9 orthologs, variants, etc).

[0364] In still other embodiments, the circular permuant Cas9 has the following structure (based on S. pyogenes Cas9 (1368 amino acids of UniProtKB—Q99ZW2 (CAS9_STRP1) (numbering is based on the amino acid position in SEQ ID NO: 18): N-terminus-[103-1368]-[optional linker]-[1-102]-C-terminus; N-terminus-[1029-1368]-[optional linker]-[1-1028]-C-terminus; N-terminus-[1042-1368]-[optional linker]-[1-1041]-C-terminus; N-terminus-[1250-1368]-[optional linker]-[1-1249]-C-terminus; or N-terminus-[1301-1368]-[optional linker]-[1-1300]-C-terminus, or the corresponding circular permutants of other Cas9 proteins (including other Cas9 orthologs, variants, etc).

[0365] In some embodiments, the circular permutant can be formed by linking a C-terminal fragment of a Cas9 to an N-terminal fragment of a Cas9, either directly or by using a linker, such as an amino acid linker. In some embodiments, The C-terminal fragment may correspond to the C-terminal 95% or more of the amino acids of a Cas9 (e.g., amino acids about 1300-1368), or the C-terminal 90%, 85%, 80%, 75%, 70%, 65%, 60%, 55%, 50%, 45%, 40%, 35%, 30%, 25%, 20%, 15%, 10%, or 5% or more of a Cas9 (e.g., any one of SEQ ID NOs: 77-86). The N-terminal portion may correspond to the N-terminal 95% or more of the amino acids of a Cas9 (e.g., amino acids about 1-1300), or the N-terminal 90%, 85%, 80%, 75%, 70%, 65%, 60%, 55%, 50%, 45%, 40%, 35%, 30%, 25%, 20%, 15%, 10%, or 5% or more of a Cas9 (e.g., of SEQ ID NO: 18).

[0366] In some embodiments, the circular permutant can be formed by linking a C-terminal fragment of a Cas9 to an N-terminal fragment of a Cas9, either directly or by using a linker, such as an amino acid linker. In some embodiments, the C-terminal fragment that is rearranged to the N-terminus, includes or corresponds to the C-terminal 30% or less of the amino acids of a Cas9 (e.g., amino acids 1012-1368 of SEQ ID NO: 18). In some embodiments, the C-terminal fragment that is rearranged to the N-terminus, includes or corresponds to the C-terminal 30%, 29%, 28%, 27%, 26%, 25%, 24%, 23%, 22%, 21%, 20%, 19%, 18%, 17%, 16%, 15%, 14%, 13%, 12%, 11%, 10%, 9%, 8%, 7%, 6%, 5%, 4%, 3%, 2%, or 1% of the amino acids of a Cas9 (e.g., the Cas9 of SEQ ID NO: 18). In some embodiments, the C-terminal fragment that is rearranged to the N-terminus, includes or corresponds to the C-terminal 410 residues or less of a Cas9 (e.g., the Cas9 of SEQ ID NO: 18). In some embodiments, the C-terminal portion that is rearranged to the N-terminus, includes or corresponds to the C-terminal 410, 400, 390, 380, 370, 360, 350, 340, 330, 320, 310, 300, 290, 280, 270, 260, 250, 240, 230, 220, 210, 200, 190, 180, 170, 160, 150, 140, 130, 120, 110, 100, 90, 80, 70, 60, 50, 40, 30, 20, or 10 residues of a Cas9 (e.g., the Cas9 of SEQ ID NO: 18). In some embodiments, the C-terminal portion that is rearranged to the N-terminus, includes or corresponds to the C-terminal 357, 341, 328, 120, or 69 residues of a Cas9 (e.g., the Cas9 of SEQ ID NO: 18).

[0367] In other embodiments, circular permutant Cas9 variants may be defined as a topological rearrangement of a Cas9 primary structure based on the following method, which is based on S. pyogenes Cas9 of SEQ ID NO: 18: (a) selecting a circular permutant (CP) site corresponding to an internal amino acid residue of the Cas9 primary structure, which dissects the original protein into two halves: an N-terminal region and a C-terminal region; (b) modifying the Cas9 protein sequence (e.g., by genetic engineering techniques) by moving the original C-terminal region (comprising the CP site amino acid) to precede the original N-terminal region, thereby forming a new N-terminus of the Cas9 protein that now begins with the CP site amino acid residue. The CP site can be located in any domain of the Cas9 protein, including, for example, the helical-II domain, the RuvCIII domain, or the CTD domain. For example, the CP site may be located (relative the S. pyogenes Cas9 of SEQ ID NO: 18) at original amino acid residue 181, 199, 230, 270, 310, 1010, 1016, 1023, 1029, 1041, 1247, 1249, or 1282. Thus, once relocated to the N-terminus, original amino acid 181, 199, 230, 270, 310, 1010, 1016, 1023, 1029, 1041, 1247, 1249, or 1282 would become the new N-terminal amino acid. Nomenclature of these CP-Cas9 proteins may be referred to as Cas9-CP¹⁸¹, Cas9-CP¹⁹⁹, Cas9-CP²³⁰, Cas9-CP²⁷⁰, Cas9-CP³¹⁰, Cas9-CP¹⁰¹⁰, Cas9-CP¹⁰¹⁶, Cas9-CP¹⁰²³, Cas9-CP¹⁰²⁹, Cas9-CP¹⁰⁴¹, Cas9-CP¹²⁴⁷, Cas9-CP¹²⁴⁹, and Cas9-CP¹²⁸², respectively. This description is not meant to be limited to making CP variants from SEQ ID NO: 18, but may be implemented to make CP variants in any Cas9 sequence, either at CP sites that correspond to these positions, or at other CP sites entirely. This description is not meant to limit the specific CP sites in any way. Virtually any CP site may be used to form a CP-Cas9 variant.

[0368] Exemplary CP-Cas9 amino acid sequences, based on the Cas9 of SEQ ID NO: 18, are provided below in which linker sequences are indicated by underlining and optional methionine (M) residues are indicated in bold. It should be appreciated that the disclosure provides CP-Cas9 sequences that do not include a linker sequence or that include different linker sequences. It should be appreciated that CP-Cas9 sequences may be based on Cas9 sequences other than that of SEQ ID NO: 18 and any examples provided herein are not meant to be limiting. Exemplary CP-Cas9 sequences are as follows:

| CP name | Sequence | SEQ ID NO: |
|---|---|---|
| CP1012 | DYKVYDVRKMIAKSEQEIGKATAKYFFYSNIMNFFKTE | SEQ ID NO: |
| | ITLANGEIRKRPLIETNGETGEIVWDKGRDFATVRKVLS | 77 |
| | MPQVNIVKKTEVQTGGFSKESILPKRNSDKLIARKKDW | |
| | DPKKYGGFDSPTVAYSVLVVAKVEKGKSKKLKSVKEL | |
| | LGITIMERSSFEKNPIDFLEAKGYKEVKKDLIIKLPKYSL | |
| | FELENGRKRMLASAGELQKGNELALPSKYVNFLYLAS | |
| | HYEKLKGSPEDNEQKQLFVEQHKHYLDEIIEQISEFSKR | |
| | VILADANLDKVLSAYNKHRDKPIREQAENIIHLFTLTNL | |
| | GAPAAFKYFDTTIDRKRYTSTKEVLDATLIHQSITGLYE | |
| | TRIDLSQLGGDGGSGGSGGSGGSGGSGGSGGDKKYSIG | |
| | LAIGTNSVGWAVITDEYKVPSKKFKVLGNTDRHSIKKN | |
| | LIGALLFDSGETAEATRLKRTARRRYTRRKNRICYLQEI | |
| | FSNEMAKVDDSFFHRLEESFLVEEDKKHERHPIFGNIVD | |
| | EVAYHEKYPTIYHLRKKLVDSTDKADLRLIYLALAHMI | |
| | KFRGHFLIEGDLNPDNSDVDKLFIQLVQTYNQLFEENPI | |
| | NASGVDAKAILSARLSKSRRLENLIAQLPGEKKNGLFG | |
| | NLIALSLGLTPNFKSNFDLAEDAKLQLSKDTYDDDLDN | |
| | LLAQIGDQYADLFLAAKNLSDAILLSDILRVNTEITKAP | |
| | LSASMIKRYDEHHQDLTLLKALVRQQLPEKYKEIFFDQ | |
| | SKNGYAGYIDGGASQEEFYKFIKPILEKMDGTEELLVK | |
| | LNREDLLRKQRTFDNGSIPHQIHLGELHAILRRQEDFYP | |
| | FLKDNREKIEKILTFRIPYYVGPLARGNSRFAWMTRKSE | |
| | ETITPWNFEEVVDKGASAQSFIERMTNFDKNLPNEKVL | |
| | PKHSLLYEYFTVYNELTKVKYVTEGMRKPAFLSGEQK | |
| | KAIVDLLFKTNRKVTVKQLKEDYFKKIECFDSVETSGV | |
| | EDRFNASLGTYHDLLKIIKDKDFLDNEENEDILEDIVLT | |
| | LTLFEDREMIEERLKTYAHLFDDKVMKQLKRRRYTGW | |
| | GRLSRKLINGIRDKQSGKTILDFLKSDGFANRNFMQLIH | |
| | DDSLTFKEDIQKAQVSGQGDSLHEHIANLAGSPAIKKGI | |
| | LQTVKVVDELVKVMGRHKPENIVIEMARENQTTQKGQ | |
| | KNSRERMKRIEEGIKELGSQILKEHPVENTQLQNEKLYL | |
| | YYLQNGRDMYVDQELDINRLSDYDVDHIVPQSFLKDD | |
| | SIDNKVLTRSDKNRGKSDNVPSEEVVKKMKNYWRQLL | |
| | NAKLITQRKFDNLTKAERGGLSELDKAGFIKRQLVETR | |
| | QITKHVAQILDSRMNTKYDENDKLIREVKVITLKSKLVS | |
| | DFRKDFQFYKVREINNYHHAHDAYLNAVVGTALIKKY | |
| | PKLESEFVYG | |
| CP1028 | EIGKATAKYFFYSNIMNFFKTEITLANGEIRKRPLIETNG | SEQ ID NO: |
| | ETGEIVWDKGRDFATVRKVLSMPQVNIVKKTEVQTGG | 78 |
| | FSKESILPKRNSDKLIARKKDWDPKKYGGFDSPTVAYS | |
| | VLVVAKVEKGKSKKLKSVKELLGITIMERSSFEKNPIDF | |
| | LEAKGYKEVKKDLIIKLPKYSLFELENGRKRMLASAGE | |
| | LQKGNELALPSKYVNFLYLASHYEKLKGSPEDNEQKQ | |
| | LFVEQHKHYLDEIIEQISEFSKRVILADANLDKVLSAYN | |
| | KHRDKPIREQAENIIHLFTLTNLGAPAAFKYFDTTIDRK | |
| | RYTSTKEVLDATLIHQSITGLYETRIDLSQLGGDGGSGG | |
| | SGGSGGSGGSGGSGGMDKKYSIGLAIGTNSVGWAVIT | |
| | DEYKVPSKKFKVLGNTDRHSIKKNLIGALLFDSGETAE | |
| | ATRLKRTARRRYTRRKNRICYLQEIFSNEMAKVDDSFF | |
| | HRLEESFLVEEDKKHERHPIFGNIVDEVAYHEKYPTIYH | |
| | LRKKLVDSTDKADLRLIYLALAHMIKFRGHFLIEGDLN | |
| | PDNSDVDKLFIQLVQTYNQLFEENPINASGVDAKAILS | |
| | ARLSKSRRLENLIAQLPGEKKNGLFGNLIALSLGLTPNF | |
| | KSNFDLAEDAKLQLSKDTYDDDLDNLLAQIGDQYADL | |
| | FLAAKNLSDAILLSDILRVNTEITKAPLSASMIKRYDEH | |
| | HQDLTLLKALVRQQLPEKYKEIFFDQSKNGYAGYIDG | |
| | GASQEEFYKFIKPILEKMDGTEELLVKLNREDLLRKQR | |
| | TFDNGSIPHQIHLGELHAILRRQEDFYPFLKDNREKIEKI | |
| | LTFRIPYYVGPLARGNSRFAWMTRKSEETITPWNFEEV | |
| | VDKGASAQSFIERMTNFDKNLPNEKVLPKHSLLYEYFT | |
| | VYNELTKVKYVTEGMRKPAFLSGEQKKAIVDLLFKTN | |
| | RKVTVKQLKEDYFKKIECFDSVEISGVEDRFNASLGTY | |
| | HDLLKIIKDKDFLDNEENEDILEDIVLTLTLFEDREMIEE | |
| | RLKTYAHLFDDKVMKQLKRRRYTGWGRLSRKLINGIR | |
| | DKQSGKTILDFLKSDGFANRNFMQLIHDDSLTFKEDIQ | |
| | KAQVSGQGDSLHEHIANLAGSPAIKKGILQTVKVVDEL | |
| | VKVMGRHKPENIVIEMARENQTTQKGQKNSRERMKRI | |
| | EEGIKELGSQILKEHPVENTQLQNEKLYLYYLQNGRD | |
| | MYVDQELDINRLSDYDVDHIVPQSFLKDDSIDNKVLTR | |
| | SDKNRGKSDNVPSEEVVKKMKNYWRQLLNAKLITQR | |
| | KFDNLTKAERGGLSELDKAGFIKRQLVETRQITKHVAQ | |
| | ILDSRMNTKYDENDKLIREVKVITLKSKLVSDFRKDFQ | |
| | FYKVREINNYHHAHDAYLNAVVGTALIKKYPKLESEF | |
| | VYGDYKVYDVRKMIAKSEQ | |
| CP1041 | NIMNFFKTEITLANGEIRKRPLIETNGETGEIVWDKGRD | SEQ ID NO: |
| | FATVRKVLSMPQVNIVKKTEVQTGGFSKESILPKRNSD | 79 |
| | KLIARKKDWDPKKYGGFDSPTVAYSVLVVAKVEKGK | |
| | SKKLKSVKELLGITIMERSSFEKNPIDFLEAKGYKEVKK | |
| | DLIIKLPKYSLFELENGRKRMLASAGELQKGNELALPS | |
| | KYVNFLYLASHYEKLKGSPEDNEQKQLFVEQHKHYLD | |
| | EIIEQISEFSKRVILADANLDKVLSAYNKHRDKPIREQA | |
| | ENIIHLFTLTNLGAPAAFKYFDTTIDRKRYTSTKEVLDA | |
| | TLIHQSITGLYETRIDLSQLGGDGGSGGSGGSGGSGGSG | |
| | GSGGDKKYSIGLAIGTNSVGWAVITDEYKVPSKKFKVL | |
| | GNTDRHSIKKNLIGALLFDSGETAEATRLKRTARRRYT | |
| | RRKNRICYLQEIFSNEMAKVDDSFFHRLEESFLVEEDK | |
| | KHERHPIFGNIVDEVAYHEKYPTIYHLRKKLVDSTDKA | |
| | DLRLIYLALAHMIKFRGHFLIEGDLNPDNSDVDKLFIQL | |
| | VQTYNQLFEENPINASGVDAKAILSARLSKSRRLENLIA | |
| | QLPGEKKNGLFGNLIALSLGLTPNFKSNFDLAEDAKLQ | |
| | LSKDTYDDDLDNLLAQIGDQYADLFLAAKNLSDAILLS | |
| | DILRVNTEITKAPLSASMIKRYDEHHQDLTLLKALVRQ | |
| | QLPEKYKEIFFDQSKNGYAGYIDGGASQEEFYKFIKPIL | |
| | EKMDGTEELLVKLNREDLLRKQRTFDNGSIPHQIHLGE | |
| | LHAILRRQEDFYPFLKDNREKIEKILTFRIPYYVGPLAR | |
| | GNSRFAWMTRKSEETITPWNFEEVVDKGASAQSFIER | |
| | MTNFDKNLPNEKVLPKHSLLYEYFTVYNELTKVKYVT | |
| | EGMRKPAFLSGEQKKAIVDLLFKTNRKVTVKQLKEDY | |
| | FKKIECFDSVETSGVEDRFNASLGTYHDLLKIIKDKDFL | |
| | DNEENEDILEDIVLTLTLFEDREMIEERLKTYAHLFDDK | |
| | VMKQLKRRRYTGWGRLSRKLINGIRDKQSGKTILDFL | |
| | KSDGFANRNFMQLIHDDSLTFKEDIQKAQVSGQGDSL | |
| | HEHIANLAGSPAIKKGILQTVKVVDELVKVMGRHKPE | |
| | NIVIEMARENQTTQKGQKNSRERMKRIEEGIKELGSQIL | |
| | KEHPVENTQLQNEKLYLYYLQNGRDMYVDQELDINR | |
| | LSDYDVDHIVPQSFLKDDSIDNKVLTRSDKNRGKSDNV | |
| | PSEEVVKKMKNYWRQLLNAKLITQRKFDNLTKAERG | |
| | GLSELDKAGFIKRQLVETRQITKHVAQILDSRMNTKYD | |
| | ENDKLIREVKVITLKSKLVSDFRKDFQFYKVREINNYH | |
| | HAHDAYLNAVVGTALIKKYPKLESEFVYGDYKVYDV | |
| | RKMIAKSEQEIGKATAKYFFYS | |
| CP1249 | PEDNEQKQLFVEQHKHYLDEIIEQISEFSKRVILADANL | SEQ ID NO: |
| | DKVLSAYNKHRDKPIREQAENIIHLFTLTNLGAPAAFK | 80 |
| | YFDTTIDRKRYTSTKEVLDATLIHQSITGLYETRIDLSQL | |
| | GGDGGSGGSGGSGGSGGSGGSGGMDKKYSIGLAIGTN | |
| | SVGWAVITDEYKVPSKKFKVLGNTDRHSIKKNLIGALL | |
| | FDSGETAEATRLKRTARRRYTRRKNRICYLQEIFSNEM | |
| | AKVDDSFFHRLEESFLVEEDKKHERHPIFGNIVDEVAY | |
| | HEKYPTIYHLRKKLVDSTDKADLRLIYLALAHMIKFRG | |
| | HFLIEGDLNPDNSDVDKLFIQLVQTYNQLFEENPINASG | |
| | VDAKAILSARLSKSRRLENLIAQLPGEKKNGLFGNLIAL | |
| | SLGLTPNFKSNFDLAEDAKLQLSKDTYDDDLDNLLAQI | |
| | GDQYADLFLAAKNLSDAILLSDILRVNTEITKAPLSAS | |
| | MIKRYDEHHQDLTLLKALVRQQLPEKYKEIFFDQSKN | |
| | GYAGYIDGGASQEEFYKFIKPILEKMDGTEELLVKLNR | |
| | EDLLRKQRTFDNGSIPHQIHLGELHAILRRQEDFYPFLK | |
| | DNREKIEKILTFRIPYYVGPLARGNSRFAWMTRKSEETI | |
| | TPWNFEEVVDKGASAQSFIERMTNFDKNLPNEKVLPK | |
| | HSLLYEYFTVYNELTKVKYVTEGMRKPAFLSGEQKKA | |
| | IVDLLFKTNRKVTVKQLKEDYFKKIECFDSVETSGVED | |
| | RFNASLGTYHDLLKIIKDKDFLDNEENEDILEDIVLTLT | |
| | LFEDREMIEERLKTYAHLFDDKVMKQLKRRRYTGWG | |
| | RLSRKLINGIRDKQSGKTILDFLKSDGFANRNFMQLIHD | |
| | DSLTFKEDIQKAQVSGQGDSLHEHIANLAGSPAIKKGIL | |
| | QTVKVVDELVKVMGRHKPENIVIEMARENQTTQKGQ | |
| | KNSRERMKRIEEGIKELGSQILKEHPVENTQLQNEKLY | |
| | LYYLQNGRDMYVDQELDINRLSDYDVDHIVPQSFLKD | |
| | DSIDNKVLTRSDKNRGKSDNVPSEEVVKKMKNYWRQ | |
| | LLNAKLITQRKFDNLTKAERGGLSELDKAGFIKRQLVE | |
| | TRQITKHVAQILDSRMNTKYDENDKLIREVKVITLKSK | |
| | LVSDFRKDFQFYKVREINNYHHAHDAYLNAVVGTALI | |
| | KKYPKLESEFVYGDYKVYDVRKMIAKSEQEIGKATAK | |
| | YFFYSNIMNFFKTEITLANGEIRKRPLIETNGETGEIVW | |
| | DKGRDFATVRKVLSMPQVNIVKKTEVQTGGFSKESILP | |
| | KRNSDKLIARKKDWDPKKYGGFDSPTVAYSVLVVAK | |
| | VEKGKSKKLKSVKELLGITIMERSSFEKNPIDFLEAKGY | |
| | KEVKKDLIIKLPKYSLFELENGRKRMLASAGELQKGNE | |
| | LALPSKYVNFLYLASHYEKLKGS | |
| CP1300 | KPIREQAENIIHLFTLTNLGAPAAFKYFDTTIDRKRYTST | SEQ ID NO: |
| | KEVLDATLIHQSITGLYETRIDLSQLGGDGGSGGSGGS | 81 |
| | GGSGGSGGSGGDKKYSIGLAIGTNSVGWAVITDEYKV | |
| | PSKKFKVLGNTDRHSIKKNLIGALLFDSGETAEATRLK | |
| | RTARRRYTRRKNRICYLQEIFSNEMAKVDDSFFHRLEE | |
| | SFLVEEDKKHERHPIFGNIVDEVAYHEKYPTIYHLRKK | |
| | LVDSTDKADLRLIYLALAHMIKFRGHFLIEGDLNPDNS | |
| | DVDKLFIQLVQTYNQLFEENPINASGVDAKAILSARLS | |
| | KSRRLENLIAQLPGEKKNGLFGNLIALSLGLTPNFKSNF | |
| | DLAEDAKLQLSKDTYDDDLDNLLAQIGDQYADLFLAA | |
| | KNLSDAILLSDILRVNTEITKAPLSASMIKRYDEHHQDL | |
| | TLLKALVRQQLPEKYKEIFFDQSKNGYAGYIDGGASQE | |
| | EFYKFIKPILEKMDGTEELLVKLNREDLLRKQRTFDNG | |
| | SIPHQIHLGELHAILRRQEDFYPFLKDNREKIEKILTFRIP | |
| | YYVGPLARGNSRFAWMTRKSEETITPWNFEEVVDKGA | |
| | SAQSFIERMTNFDKNLPNEKVLPKHSLLYEYFTVYNEL | |
| | TKVKYVTEGMRKPAFLSGEQKKAIVDLLFKTNRKVTV | |
| | KQLKEDYFKKIECFDSVETSGVEDRFNASLGTYHDLLKI | |
| | IKDKDFLDNEENEDILEDIVLTLTLFEDREMIEERLKTY | |
| | AHLFDDKVMKQLKRRRYTGWGRLSRKLINGIRDKQSG | |
| | KTILDFLKSDGFANRNFMQLIHDDSLTFKEDIQKAQVS | |
| | GQGDSLHEHIANLAGSPAIKKGILQTVKVVDELVKVM | |
| | GRHKPENIVIEMARENQTTQKGQKNSRERMKRIEEGIK | |
| | ELGSQILKEHPVENTQLQNEKLYLYYLQNGRDMYVDQ | |
| | ELDINRLSDYDVDHIVPQSFLKDDSIDNKVLTRSDKNR | |
| | GKSDNVPSEEVVKKMKNYWRQLLNAKLITQRKFDNL | |
| | TKAERGGLSELDKAGFIKRQLVETRQITKHVAQILDSR | |
| | MNTKYDENDKLIREVKVITLKSKLVSDFRKDFQFYKV | |
| | REINNYHHAHDAYLNAVVGTALIKKYPKLESEFVYGD | |
| | YKVYDVRKMIAKSEQEIGKATAKYFFYSNIMNFFKTEI | |
| | TLANGEIRKRPLIETNGETGEIVWDKGRDFATVRKVLS | |
| | MPQVNIVKKTEVQTGGFSKESILPKRNSDKLIARKKDW | |
| | DPKKYGGFDSPTVAYSVLVVAKVEKGKSKKLKSVKEL | |
| | LGITIMERSSFEKNPIDFLEAKGYKEVKKDLIIKLPKYSL | |
| | FELENGRKRMLASAGELQKGNELALPSKYVNFLYLAS | |
| | HYEKLKGSPEDNEQKQLFVEQHKHYLDEIIEQISEFSKR | |
| | VILADANLDKVLSAYNKHRD | |

[0369] The Cas9 circular permutants that may be useful in the prime editing constructs described herein. Exemplary C-terminal fragments of Cas9, based on the Cas9 of SEQ ID NO: 18, which may be rearranged to an N-terminus of Cas9, are provided below. It should be appreciated that such C-terminal fragments of Cas9 are exemplary and are not meant to be limiting. These exemplary CP-Cas9 fragments have the following sequences:

| CP name | Sequence | SEQ ID NO: |
|---|---|---|
| CP1012 C- | DYKVYDVRKMIAKSEQEIGKATAKYFFYSNIMNFFKT | SEQ ID NO: |
| terminal | EITLANGEIRKRPLIETNGETGEIVWDKGRDFATVRKVL | 82 |
| fragment | SMPQVNIVKKTEVQTGGFSKESILPKRNSDKLIARKKD | |
| | WDPKKYGGFDSPTVAYSVLVVAKVEKGKSKKLKSVK | |
| | ELLGITIMERSSFEKNPIDFLEAKGYKEVKKDLIIKLPKY | |
| | SLFELENGRKRMLASAGELQKGNELALPSKYVNFLYL | |
| | ASHYEKLKGSPEDNEQKQLFVEQHKHYLDEIIEQISEFS | |
| | KRVILADANLDKVLSAYNKHRDKPIREQAENIIHLFTLT | |
| | NLGAPAAFKYFDTTIDRKRYTSTKEVLDATLIHQSITGL | |
| | YETRIDLSQLGGD | |
| CP1028 C- | EIGKATAKYFFYSNIMNFFKTEITLANGEIRKRPLIETNG | SEQ ID NO: |
| terminal | ETGEIVWDKGRDFATVRKVLSMPQVNIVKKTEVQTGG | 83 |
| fragment | FSKESILPKRNSDKLIARKKDWDPKKYGGFDSPTVAYS | |
| | VLVVAKVEKGKSKKLKSVKELLGITIMERSSFEKNPIDF | |
| | LEAKGYKEVKKDLIIKLPKYSLFELENGRKRMLASAGE | |
| | LQKGNELALPSKYVNFLYLASHYEKLKGSPEDNEQKQ | |
| | LFVEQHKHYLDEIIEQISEFSKRVILADANLDKVLSAYN | |
| | KHRDKPIREQAENIIHLFTLTNLGAPAAFKYFDTTIDRK | |
| | RYTSTKEVLDATLIHQSITGLYETRIDLSQLGGD | |
| CP1041 C- | NIMNFFKTEITLANGEIRKRPLIETNGETGEIVWDKGRD | SEQ ID NO: |
| terminal | FATVRKVLSMPQVNIVKKTEVQTGGFSKESILPKRNSD | 84 |
| fragment | KLIARKKDWDPKKYGGFDSPTVAYSVLVVAKVEKGK | |
| | SKKLKSVKELLGITIMERSSFEKNPIDFLEAKGYKEVKK | |
| | DLIIKLPKYSLFELENGRKRMLASAGELQKGNELALPS | |
| | KYVNFLYLASHYEKLKGSPEDNEQKQLFVEQHKHYLD | |
| | EIIEQISEFSKRVILADANLDKVLSAYNKHRDKPIREQA | |
| | ENIIHLFTLTNLGAPAAFKYFDTTIDRKRYTSTKEVLDA | |
| | TLIHQSITGLYETRIDLSQLGGD | |
| CP1249 C- | PEDNEQKQLFVEQHKHYLDEIIEQISEFSKRVILADANL | SEQ ID NO: |
| terminal | DKVLSAYNKHRDKPIREQAENIIHLFTLTNLGAPAAFK | 85 |
| fragment | YFDTTIDRKRYTSTKEVLDATLIHQSITGLYETRIDLSQL | |
| | GGD | |
| CP1300 C- | KPIREQAENIIHLFTLTNLGAPAAFKYFDTTIDRKRYTST | SEQ ID NO: |
| terminal | KEVLDATLIHQSITGLYETRIDLSQLGGD | 86 |
| fragment | | |

[0370] I. Cas9 Variants with Modified PAM Specificities

[0371] The prime editors of the present disclosure may also comprise Cas9 variants with modified PAM specificities. Some aspects of this disclosure provide Cas9 proteins that exhibit activity on a target sequence that does not comprise the canonical PAM (5′-NGG-3′, where N is A, C, G, or T) at its 3′-end. In some embodiments, the Cas9 protein exhibits activity on a target sequence comprising a 5′-NGG-3′ PAM sequence at its 3′-end. In some embodiments, the Cas9 protein exhibits activity on a target sequence comprising a 5′-NNG-3′ PAM sequence at its 3′-end. In some embodiments, the Cas9 protein exhibits activity on a target sequence comprising a 5′-NNA-3′ PAM sequence at its 3′-end. In some embodiments, the Cas9 protein exhibits activity on a target sequence comprising a 5′-NNC-3′ PAM sequence at its 3′-end. In some embodiments, the Cas9 protein exhibits activity on a target sequence comprising a 5′-NNT-3′ PAM sequence at its 3′-end. In some embodiments, the Cas9 protein exhibits activity on a target sequence comprising a 5′-NGT-3′ PAM sequence at its 3′-end. In some embodiments, the Cas9 protein exhibits activity on a target sequence comprising a 5′-NGA-3′ PAM sequence at its 3′-end. In some embodiments, the Cas9 protein exhibits activity on a target sequence comprising a 5′-NGC-3′ PAM sequence at its 3′-end. In some embodiments, the Cas9 protein exhibits activity on a target sequence comprising a 5′-NAA-3′ PAM sequence at its 3′-end. In some embodiments, the Cas9 protein exhibits activity on a target sequence comprising a 5′-NAC-3′ PAM sequence at its 3′-end. In some embodiments, the Cas9 protein exhibits activity on a target sequence comprising a 5′-NAT-3′ PAM sequence at its 3′-end. In still other embodiments, the Cas9 protein exhibits activity on a target sequence comprising a 5′-NAG-3′ PAM sequence at its 3′-end.

[0372] It should be appreciated that any of the amino acid mutations described herein, (e.g., A262T) from a first amino acid residue (e.g., A) to a second amino acid residue (e.g., T) may also include mutations from the first amino acid residue to an amino acid residue that is similar to (e.g., conserved) the second amino acid residue. For example, mutation of an amino acid with a hydrophobic side chain (e.g., alanine, valine, isoleucine, leucine, methionine, phenylalanine, tyrosine, or tryptophan) may be a mutation to a second amino acid with a different hydrophobic side chain (e.g., alanine, valine, isoleucine, leucine, methionine, phenylalanine, tyrosine, or tryptophan). For example, a mutation of an alanine to a threonine (e.g., a A262T mutation) may also be a mutation from an alanine to an amino acid that is similar in size and chemical properties to a threonine, for example, serine. As another example, mutation of an amino acid with a positively charged side chain (e.g., arginine, histidine, or lysine) may be a mutation to a second amino acid with a different positively charged side chain (e.g., arginine, histidine, or lysine). As another example, mutation of an amino acid with a polar side chain (e.g., serine, threonine, asparagine, or glutamine) may be a mutation to a second amino acid with a different polar side chain (e.g., serine, threonine, asparagine, or glutamine). Additional similar amino acid pairs include, but are not limited to, the following: phenylalanine and tyrosine; asparagine and glutamine; methionine and cysteine; aspartic acid and glutamic acid; and arginine and lysine. The skilled artisan would recognize that such conservative amino acid substitutions will likely have minor effects on protein structure and are likely to be well tolerated without compromising function. In some embodiments, any amino of the amino acid mutations provided herein from one amino acid to a threonine may be an amino acid mutation to a serine. In some embodiments, any amino of the amino acid mutations provided herein from one amino acid to an arginine may be an amino acid mutation to a lysine. In some embodiments, any amino of the amino acid mutations provided herein from one amino acid to an isoleucine, may be an amino acid mutation to an alanine, valine, methionine, or leucine. In some embodiments, any amino of the amino acid mutations provided herein from one amino acid to a lysine may be an amino acid mutation to an arginine. In some embodiments, any amino of the amino acid mutations provided herein from one amino acid to an aspartic acid may be an amino acid mutation to a glutamic acid or asparagine. In some embodiments, any amino of the amino acid mutations provided herein from one amino acid to a valine may be an amino acid mutation to an alanine, isoleucine, methionine, or leucine. In some embodiments, any amino of the amino acid mutations provided herein from one amino acid to a glycine may be an amino acid mutation to an alanine. It should be appreciated, however, that additional conserved amino acid residues would be recognized by the skilled artisan and any of the amino acid mutations to other conserved amino acid residues are also within the scope of this disclosure.

[0373] In some embodiments, the Cas9 protein comprises a combination of mutations that exhibit activity on a target sequence comprising a 5′-NAA-3′ PAM sequence at its 3′-end. In some embodiments, the combination of mutations are present in any one of the clones listed in Table 1. In some embodiments, the combination of mutations are conservative mutations of the clones listed in Table 1. In some embodiments, the Cas9 protein comprises the combination of mutations of any one of the Cas9 clones listed in Table 1.

TABLE 1
NAA PAM Clones
Mutations from wild-type SpCas9 (e.g., SEQ ID NO: 18)

D177N, K218R, D614N, D1135N, P1137S, E1219V, A1320V,
A1323D, R1333K
D177N, K218R, D614N, D1135N, E1219V, Q1221H, H1264Y,
A1320V, R1333K
A10T, I322V, S409I, E427G, G715C, D1135N, E1219V, Q1221H,
H1264Y, A1320V, R1333K
A367T, K710E, R1114G, D1135N, P1137S, E1219V, Q1221H,
H1264Y, A1320V, R1333K
A10T, I322V, S409I, E427G, R753G, D861N, D1135N, K1188R,
E1219V, Q1221H, H1264H, A1320V, R1333K
A10T, I322V, S409I, E427G, R654L, V743I, R753G, M1021T,
D1135N, D1180G, K1211R, E1219V, Q1221H, H1264Y,
A1320V, R1333K
A10T, I322V, S409I, E427G, V743I, R753G, E762G, D1135N,
D1180G, K1211R, E1219V, Q1221H, H1264Y, A1320V, R1333K
A10T, I322V, S409I, E427G, R753G, D1135N, D1180G, K1211R,
E1219V, Q1221H, H1264Y, S1274R, A1320V, R1333K
A10T, I322V, S409I, E427G, A5895, R753G, D1135N, E1219V,
Q1221H, H1264H, A1320V, R1333K
A10T, I322V, S409I, E427G, R753G, E757K, G865G, D1135N,
E1219V, Q1221H, H1264Y, A1320V, R1333K
A10T, I322V, S409I, E427G, R654L, R753G, E757K, D1135N,
E1219V, Q1221H, H1264Y, A1320V, R1333K
A10T, I322V, S409I, E427G, K599R, M631A, R654L, K673E,
V743I, R753G, N758H, E762G, D1135N, D1180G, E1219V,
Q1221H, Q1256R, H1264Y, A1320V, A1323D, R1333K
A10T, I322V, S409I, E427G, R654L, K673E, V743I, R753G,
E762G, N8695, N1054D, R1114G, D1135N, D1180G, E1219V,
Q1221H, H1264Y, A1320V, A1323D, R1333K
A10T, I322V, S409I, E427G, R654L, L727I, V743I, R753G,
E762G, R8595, N946D, F1134L, D1135N, D1180G, E1219V,
Q1221H, H1264Y, N1317T, A1320V, A1323D, R1333K
A10T, I322V, S409I, E427G, R654L, K673E, V743I, R753G,
E762G, N803S, N869S, Y1016D, G1077D, R1114G, F1134L,
D1135N, D1180G, E1219V, Q1221H, H1264Y, V1290G, L13185,
A1320V, A1323D, R1333K
A10T, I322V, S409I, E427G, R654L, K673E, V743I, R753G, E762G,
N803S, N869S, Y1016D, G1077D, R1114G, F1134L, D1135N,
K1151E, D1180G, E1219V, Q1221H, H1264Y, V1290G,
L13185, A1320V, R1333K
A10T, I322V, S409I, E427G, R654L, K673E, V743I, R753G, E762G,
N803S, N8695, Y1016D, G1077D, R1114G, F1134L, D1135N,
D1180G, E1219V, Q1221H, H1264Y, V1290G, L1318S, A1320V,
A1323D, R1333K
A10T, I322V, S409I, E427G, R654L, K673E, F693L, V743I, R753G,
E762G, N803S, N869S, L921P, Y1016D, G1077D, F1080S,
R1114G, D1135N, D1180G, E1219V, Q1221H, H1264Y, L1318S,
A1320V, A1323D, R1333K
A10T, I322V, S409I, E427G, E630K, R654L, K673E, V743I, R753G,
E762G, Q768H, N803S, N869S, Y1016D, G1077D, R1114G,
F1134L, D1135N, D1180G, E1219V, Q1221H, H1264Y, L1318S,
A1320V, R1333K
A10T, I322V, S409I, E427G, R654L, K673E, F693L, V743I, R753G,
E762G, Q768H, N803S, N869S, Y1016D, G1077D, R1114G, F1134L,
D1135N, D1180G, E1219V, Q1221H, G1223S, H1264Y, L1318S,
A1320V, R1333K
A10T, I322V, S409I, E427G, R654L, K673E, F693L, V743I, R753G,
E762G, N803S, N869S, L921P, Y1016D, G1077D, F1801S, R1114G,
D1135N, D1180G, E1219V, Q1221H, H1264Y, L1318S, A1320V,
A1323D, R1333K
A10T, I322V, S409I, E427G, R654L, V743I, R753G, M1021T,
D1135N, D1180G, K1211R, E1219V, Q1221H, H1264Y, A1320V,
R1333K
A10T, I322V, S409I, E427G, R654L, K673E, V743I, R753G, E762G,
M673I, N803S, N869S, G1077D, R1114G, D1135N, V1139A,
D1180G, E1219V, Q1221H, A1320V, R1333K
A10T, I322V, S409I, E427G, R654L, K673E, V743I, R753G, E762G,
N803S, N869S, R1114G, D1135N, E1219V, Q1221H, A1320V,
R1333K

[0374] In some embodiments, the Cas9 protein comprises an amino acid sequence that is at least 80% identical to the amino acid sequence of a Cas9 protein as provided by any one of the variants of Table 1. In some embodiments, the Cas9 protein comprises an amino acid sequence that is at least 85%, at least 90%, at least 92%, at least 95%, at least 96%, at least 97%, at least 98%, at least 99%, or at least 99.5% identical to the amino acid sequence of a Cas9 protein as provided by any one of the variants of Table 1.

[0375] In some embodiments, the Cas9 protein exhibits an increased activity on a target sequence that does not comprise the canonical PAM (5′-NGG-3′) at its 3′ end as compared to Streptococcus pyogenes Cas9 as provided by SEQ ID NO: 18. In some embodiments, the Cas9 protein exhibits an activity on a target sequence having a 3′ end that is not directly adjacent to the canonical PAM sequence (5′-NGG-3′) that is at least 5-fold increased as compared to the activity of Streptococcus pyogenes Cas9 as provided by SEQ ID NO: 18 on the same target sequence. In some embodiments, the Cas9 protein exhibits an activity on a target sequence that is not directly adjacent to the canonical PAM sequence (5′-NGG-3′) that is at least 10-fold, at least 50-fold, at least 100-fold, at least 500-fold, at least 1,000-fold, at least 5,000-fold, at least 10,000-fold, at least 50,000-fold, at least 100,000-fold, at least 500,000-fold, or at least 1,000,000-fold increased as compared to the activity of Streptococcus pyogenes as provided by SEQ ID NO: 18 on the same target sequence. In some embodiments, the 3′ end of the target sequence is directly adjacent to an AAA, GAA, CAA, or TAA sequence. In some embodiments, the Cas9 protein comprises a combination of mutations that exhibit activity on a target sequence comprising a 5′-NAC-3′ PAM sequence at its 3′-end. In some embodiments, the combination of mutations are present in any one of the clones listed in Table 2. In some embodiments, the combination of mutations are conservative mutations of the clones listed in Table 2. In some embodiments, the Cas9 protein comprises the combination of mutations of any one of the Cas9 clones listed in Table 2.

TABLE 2
NAC PAM Clones
MUTATIONS FROM WILD-TYPE SPCAS9 (E.G., SEQ ID NO: 18)

T472I, R753G, K890E, D1332N, R1335Q, T1337N
I1057S, D1135N, P1301S, R1335Q, T1337N
T472I, R753G, D1332N, R1335Q, T1337N
D1135N, E1219V, D1332N, R1335Q, T1337N
T472I, R753G, K890E, D1332N, R1335Q, T1337N
I1057S, D1135N, P1301S, R1335Q, T1337N
T472I, R753G, D1332N, R1335Q, T1337N
T472I, R753G, Q771H, D1332N, R1335Q, T1337N
E627K, T638P, K652T, R753G, N803S, K959N, R1114G, D1135N,
E1219V, D1332N, R1335Q, T1337N
E627K, T638P, K652T, R753G, N803S, K959N, R1114G, D1135N,
K1156E, E1219V, D1332N, R1335Q, T1337N
E627K, T638P, V647I, R753G, N803S, K959N, G1030R, I1055E,
R1114G, D1135N, E1219V, D1332N, R1335Q, T1337N
E627K, E630G, T638P, V647A, G687R, N767D, N803S, K959N,
R1114G, D1135N, E1219V, D1332G, R1335Q, T1337N
E627K, T638P, R753G, N803S, K959N, R1114G, D1135N, E1219V,
N1266H, D1332N, R1335Q, T1337N
E627K, T638P, R753G, N803S, K959N, I1057T, R1114G, D1135N,
E1219V, D1332N, R1335Q, T1337N
E627K, T638P, R753G, N803S, K959N, R1114G, D1135N, E1219V,
D1332N, R1335Q, T1337N
E627K, M631I, T638P, R753G, N803S, K959N, Y1036H, R1114G,
D1135N, E1219V, D1251G, D1332G, R1335Q, T1337N
E627K, T638P, R753G, N803S, V875I, K959N, Y1016C, R1114G,
D1135N, E1219V, D1251G, D1332G, R1335Q, T1337N, I1348V
K608R, E627K, T638P, V647I, R654L, R753G, N803S, T804A,
K848N, V922A, K959N, R1114G, D1135N, E1219V, D1332N,
R1335Q, T1337N
K608R, E627K, T638P, V647I, R753G, N803S, V922A, K959N,
K1014N, V1015A, R1114G, D1135N, K1156N, E1219V, N1252D,
D1332N, R1335Q, T1337N
K608R, E627K, R629G, T638P, V647I, A711T, R753G, K775R,
K789E, N803S, K959N, V1015A, Y1036H, R1114G, D1135N,
E1219V, N1286H, D1332N, R1335Q, T1337N
K608R, E627K, T638P, V647I, T740A, R753G, N803S, K948E,
K959N, Y1016S, R1114G, D1135N, E1219V, N1286H, D1332N,
R1335Q, T1337N
K608R, E627K, T638P, V647I, T740A, N803S, K948E, K959N,
Y1016S, R1114G, D1135N, E1219V, N1286H, D1332N, R1335Q,
T1337N
I670S, K608R, E627K, E630G, T638P, V647I, R653K, R753G, I795L,
K797N, N803S, K866R, K890N, K959N, Y1016C, R1114G, D1135N,
E1219V, D1332N, R1335Q, T1337N
K608R, E627K, T638P, V647I, T740A, G752R, R753G, K797N,
N803S, K948E, K959N, V1015A, Y1016S, R1114G, D1135N,
E1219V, N1266H, D1332N, R1335Q, T1337N
I570T, A589V, K608R, E627K, T638P, V647I, R654L, Q716R,
R753G, N803S, K948E, K959N, Y1016S, R1114G, D1135N,
E1207G, E1219V, N1234D, D1332N, R1335Q, T1337N
K608R, E627K, R629G, T638P, V647I, R654L, Q740R, R753G,
N803S, K959N, N990S, T995S, V1015A, Y1036D, R1114G, D1135N,
E1207G, E1219V, N1234D, N1266H, D1332N, R1335Q, T1337N
I562F, V565D, I570T, K608R, L625S, E627K, T638P, V647I, R654I,
G752R, R753G, N803S, N808D, K959N, M1021L, R1114G, D1135N,
N1177S, N1234D, D1332N, R1335Q, T1337N
I562F, I570T, K608R, E627K, T638P, V647I, R753G, E790A, N803S,
K959N, V1015A, Y1036H, R1114G, D1135N, D1180E, A1184T,
E1219V, D1332N, R1335Q, T1337N
I570T, K608R, E627K, T638P, V647I, R654H, R753G, E790A,
N803S, K959N, V1015A, R1114G, D1127A, D1135N, E1219V,
D1332N, R1335Q, T1337N
I570T, K608R, L625S, E627K, T638P, V647I, R654I, T703P, R753G,
N803S, N808D, K959N, M1021L, R1114G, D1135N, E1219V,
D1332N, R1335Q, T1337N
I570S, K608R, E627K, E630G, T638P, V647I, R653K, R753G,
I795L, N803S, K866R, K890N, K959N, Y1016C, R1114G,
D1135N, E1219V, D1332N, R1335Q, T1337N
I570T, K608R, E627K, T638P, V647I, R654H, R753G, E790A,
N803S, K959N, V1016A, R1114G, D1135N, E1219V, K1246E,
D1332N, R1335Q, T1337N
K608R, E627K, T638P, V647I, R654L, K673E, R753G, E790A,
N803S, K948E, K959N, R1114G, D1127G, D1135N, D1180E,
E1219V, N1286H, D1332N, R1335Q, T1337N
K608R, L625S, E627K, T638P, V647I, R654I, I670T, R753G,
N803S, N808D, K959N, M1021L, R1114G, D1135N, E1219V,
N1286H, D1332N, R1335Q, T1337N
E627K, M631V, T638P, V647I, K710E, R753G, N803S, N808D,
K948E, M1021L, R1114G, D1135N, E1219V, D1332N, R1335Q,
T1337N, S1338T, H1349R

[0376] In some embodiments, the Cas9 protein comprises an amino acid sequence that is at least 80% identical to the amino acid sequence of a Cas9 protein as provided by any one of the variants of Table 2. In some embodiments, the Cas9 protein comprises an amino acid sequence that is at least 85%, at least 90%, at least 92%, at least 95%, at least 96%, at least 97%, at least 98%, at least 99%, or at least 99.5% identical to the amino acid sequence of a Cas9 protein as provided by any one of the variants of Table 2.

[0377] In some embodiments, the Cas9 protein exhibits an increased activity on a target sequence that does not comprise the canonical PAM (5′-NGG-3′) at its 3′ end as compared to Streptococcus pyogenes Cas9 as provided by SEQ ID NO: 18. In some embodiments, the Cas9 protein exhibits an activity on a target sequence having a 3′ end that is not directly adjacent to the canonical PAM sequence (5′-NGG-3′) that is at least 5-fold increased as compared to the activity of Streptococcus pyogenes Cas9 as provided by SEQ ID NO: 18 on the same target sequence. In some embodiments, the Cas9 protein exhibits an activity on a target sequence that is not directly adjacent to the canonical PAM sequence (5′-NGG-3′) that is at least 10-fold, at least 50-fold, at least 100-fold, at least 500-fold, at least 1,000-fold, at least 5,000-fold, at least 10,000-fold, at least 50,000-fold, at least 100,000-fold, at least 500,000-fold, or at least 1,000,000-fold increased as compared to the activity of Streptococcus pyogenes as provided by SEQ ID NO: 18 on the same target sequence. In some embodiments, the 3 end of the target sequence is directly adjacent to an AAC, GAC, CAC, or TAC sequence.

[0378] In some embodiments, the Cas9 protein comprises a combination of mutations that exhibit activity on a target sequence comprising a 5′-NAT-3′ PAM sequence at its 3′-end. In some embodiments, the combination of mutations are present in any one of the clones listed in Table 3. In some embodiments, the combination of mutations are conservative mutations of the clones listed in Table 3. In some embodiments, the Cas9 protein comprises the combination of mutations of any one of the Cas9 clones listed in Table 3.

TABLE 3
NAT PAM Clones
MUTATIONS FROM WILD-TYPE SPCAS9 (E.G., SEQ ID NO: 18)

K961E, H985Y, D1135N, K1191N, E1219V, Q1221H, A1320A,
P1321S, R1335L
D1135N, G1218S, E1219V, Q1221H, P1249S, P1321S, D1322G,
R1335L
V743I, R753G, E790A, D1135N, G1218S, E1219V, Q1221H,
A1227V, P1249S, N1286K, A1293T, P1321S, D1322G, R1335L,
T1339I
F575S, M631L, R654L, V748I, V743I, R753G, D853E, V922A,
R1114G D1135N, G1218S, E1219V, Q1221H, A1227V, P1249S,
N1286K, A1293T, P1321S, D1322G, R1335L, T1339I
F575S, M631L, R654L, R664K, R753G, D853E, V922A, R1114G
D1135N, D1180G, G1218S, E1219V, Q1221H, P1249S,
N1286K, P1321S, D1322G, R1335L
M631L, R654L, R753G, K797E, D853E, V922A, D1012A,
R1114G D1135N, G1218S, E1219V, Q1221H, P1249S, N1317K,
P1321S, D1322G, R1335L
F575S, M631L, R654L, R664K, R753G, D853E, V922A,
R1114G, Y1131C, D1135N, D1180G, G1218S, E1219V,
Q1221H, P1249S, P1321S, D1322G, R1335L
F575S, M631L, R654L, R664K, R753G, D853E, V922A,
R1114G, Y1131C, D1135N, D1180G, G1218S, E1219V, Q1221H,
P1249S, P1321S, D1322G, R1335L
F575S, D596Y, M631L, R654L, R664K, R753G, D853E, V922A,
R1114G, Y1131C, D1135N, D1180G, G1218S, E1219V, Q1221H,
P1249S, Q1256R, P1321S, D1322G, R1335L
F575S, M631L, R654L, R664K, K710E, V750A, R753G, D853E,
V922A, R1114G, Y1131C, D1135N, D1180G, G1218S, E1219V,
Q1221H, P1249S, P1321S, D1322G, R1335L
F575S, M631L, K649R, R654L, R664K, R753G, D853E, V922A,
R1114G, Y1131C, D1135N, K1156E D1180G, G1218S, E1219V,
Q1221H, P1249S, P1321S, D1322G, R1335L
F575S, M631L, R654L, R664K, R753G, D853E, V922A, R1114G,
Y1131C, D1135N, D1180G, G1218S, E1219V, Q1221H, P1249S,
P1321S, D1322G, R1335L
F575S, M631L, R654L, R664K, R753G, D853E, V922A, I1057G,
R1114G, Y1131C, D1135N, D1180G, G1218S, E1219V, Q1221H,
P1249S, N1308D, P1321S, D1322G, R1335L
M631L, R654L, R753G, D853E, V922A, R1114G, Y1131C,
D1135N, E1150V, D1180G, G1218S, E1219V, Q1221H,
P1249S, P1321S, D1332G, R1335L
M631L, R654L, R664K, R753G, D853E, I1057V, Y1131C,
D1135N, D1180G, G1218S, E1219V, Q1221H, P1249S, P1321S,
D1332G, R1335L
M631L, R654L, R664K, R753G, I1057V, R1114G, Y1131C,
D1135N, D1180G, G1218S, E1219V, Q1221H, P1249S,
P1321S, D1332G, R1335L

[0379] The above description of various napDNAbps which can be used in connection with the presently disclose prime editors is not meant to be limiting in any way. The prime editors may comprise the canonical SpCas9, or any ortholog Cas9 protein, or any variant Cas9 protein-including any naturally occurring variant, mutant, or otherwise engineered version of Cas9—that is known or which can be made or evolved through a directed evolutionary or otherwise mutagenic process. In various embodiments, the Cas9 or Cas9 variants have a nickase activity, i.e., only cleave of strand of the target DNA sequence. In other embodiments, the Cas9 or Cas9 variants have inactive nucleases, i.e., are “dead” Cas9 proteins. Other variant Cas9 proteins that may be used are those having a smaller molecular weight than the canonical SpCas9 (e.g., for easier delivery) or having modified or rearranged primary amino acid structure (e.g., the circular permutant formats). The prime editors described herein may also comprise Cas9 equivalents, including Cas12a/Cpf1 and Cas12b proteins which are the result of convergent evolution. The napDNAbps used herein (e.g., SpCas9, Cas9 variant, or Cas9 equivalents) may also may also contain various modifications that alter/enhance their PAM specifities. Lastly, the application contemplates any Cas9, Cas9 variant, or Cas9 equivalent which has at least 70%, at least 75%, at least 80%, at least 85%, at least 90%, at least 91%, at least 92%, at least 93%, at least 94%, at least 95%, at least 96%, at least 97%, at least 98%, at least 99%, or at least 99.9% sequence identity to a reference Cas9 sequence, such as a references SpCas9 canonical sequences or a reference Cas9 equivalent (e.g., Cas12a/Cpf1).

[0380] In a particular embodiment, the Cas9 variant having expanded PAM capabilities is SpCas9 (H840A) VRQR (SEQ ID NO: 87), which has the following amino acid sequence (with the V, R, Q, R substitutions relative to the SpCas9 (H840A) of SEQ ID NO: 51 being show in bold underline. In addition, the methionine residue in SpCas9 (H840) was removed for SpCas9 (H840A) VRQR):

(SEQ ID NO: 87)
DKKYSIGLDIGTNSVGWAVITDEYKVPSKKFKVLGNTDRHSIKKNLIGAL
LFDSGETAEATRLKRTARRRYTRRKNRICYLQEIFSNEMAKVDDSFFHRL
EESFLVEEDKKHERHPIFGNIVDEVAYHEKYPTIYHLRKKLVDSTDKADL
RLIYLALAHMIKFRGHFLIEGDLNPDNSDVDKLFIQLVQTYNQLFEENPI
NASGVDAKAILSARLSKSRRLENLIAQLPGEKKNGLFGNLIALSLGLTPN
FKSNFDLAEDAKLQLSKDTYDDDLDNLLAQIGDQYADLFLAAKNLSDAIL
LSDILRVNTEITKAPLSASMIKRYDEHHQDLTLLKALVRQQLPEKYKEIF
FDQSKNGYAGYIDGGASQEEFYKFIKPILEKMDGTEELLVKLNREDLLRK
QRTFDNGSIPHQIHLGELHAILRRQEDFYPFLKDNREKIEKILTFRIPYY
VGPLARGNSRFAWMTRKSEETITPWNFEEVVDKGASAQSFIERMTNFDKN
LPNEKVLPKHSLLYEYFTVYNELTKVKYVTEGMRKPAFLSGEQKKAIVDL
LFKTNRKVTVKQLKEDYFKKIECFDSVETSGVEDRFNASLGTYHDLLKII
KDKDFLDNEENEDILEDIVLTLTLFEDREMIEERLKTYAHLFDDKVMKQL
KRRRYTGWGRLSRKLINGIRDKQSGKTILDFLKSDGFANRNFMQLIHDDS
LTFKEDIQKAQVSGQGDSLHEHIANLAGSPAIKKGILQTVKVVDELVKVM
GRHKPENIVIEMARENQTTQKGQKNSRERMKRIEEGIKELGSQILKEHPV
ENTQLQNEKLYLYYLQNGRDMYVDQELDINRLSDYDVDAIVPQSFLKDDS
IDNKVLTRSDKNRGKSDNVPSEEVVKKMKNYWRQLLNAKLITQRKFDNLT
KAERGGLSELDKAGFIKRQLVETRQITKHVAQILDSRMNTKYDENDKLIR
EVKVITLKSKLVSDFRKDFQFYKVREINNYHHAHDAYLNAVVGTALIKKY
PKLESEFVYGDYKVYDVRKMIAKSEQEIGKATAKYFFYSNIMNFFKTEIT
LANGEIRKRPLIETNGETGEIVWDKGRDFATVRKVLSMPQVNIVKKTEVQ
TGGFSKESILPKRNSDKLIARKKDWDPKKYGGFVSPTVAYSVLVVAKVEK
GKSKKLKSVKELLGITIMERSSFEKNPIDFLEAKGYKEVKKDLIIKLPKY
SLFELENGRKRMLASARELQKGNELALPSKYVNFLYLASHYEKLKGSPED
NEQKQLFVEQHKHYLDEIIEQISEFSKRVILADANLDKVLSAYNKHRDKP
IREQAENIIHLFTLTNLGAPAAFKYFDTTIDRQYRSTKEVLDATLIHQSI
TGLYETRIDLSQLGGD

[0381] In another particular embodiment, the Cas9 variant having expanded PAM capabilities is SpCas9 (H840A) VRER, which has the following amino acid sequence (with the V, R, E, R substitutions relative to the SpCas9 (H840A) of SEQ ID NO: 51 being shown in bold underline. In addition, the methionine residue in SpCas9 (H840) was removed for SpCas9 (H840A) VRER):

(SEQ ID NO: 88)
DKKYSIGLDIGTNSVGWAVITDEYKVPSKKFKVLGNTDRHSIKKNLIGAL
LFDSGETAEATRLKRTARRRYTRRKNRICYLQEIFSNEMAKVDDSFFHRL
EESFLVEEDKKHERHPIFGNIVDEVAYHEKYPTIYHLRKKLVDSTDKADL
RLIYLALAHMIKFRGHFLIEGDLNPDNSDVDKLFIQLVQTYNQLFEENPI
NASGVDAKAILSARLSKSRRLENLIAQLPGEKKNGLFGNLIALSLGLTPN
FKSNFDLAEDAKLQLSKDTYDDDLDNLLAQIGDQYADLFLAAKNLSDAIL
LSDILRVNTEITKAPLSASMIKRYDEHHQDLTLLKALVRQQLPEKYKEIF
FDQSKNGYAGYIDGGASQEEFYKFIKPILEKMDGTEELLVKLNREDLLRK
QRTFDNGSIPHQIHLGELHAILRRQEDFYPFLKDNREKIEKILTFRIPYY
VGPLARGNSRFAWMTRKSEETITPWNFEEVVDKGASAQSFIERMTNFDKN
LPNEKVLPKHSLLYEYFTVYNELTKVKYVTEGMRKPAFLSGEQKKAIVDL
LFKTNRKVTVKQLKEDYFKKIECFDSVEISGVEDRFNASLGTYHDLLKII
KDKDFLDNEENEDILEDIVLTLTLFEDREMIEERLKTYAHLFDDKVMKQL
KRRRYTGWGRLSRKLINGIRDKQSGKTILDFLKSDGFANRNFMQLIHDDS
LTFKEDIQKAQVSGQGDSLHEHIANLAGSPAIKKGILQTVKVVDELVKVM
GRHKPENIVIEMARENQTTQKGQKNSRERMKRIEEGIKELGSQILKEHPV
ENTQLQNEKLYLYYLQNGRDMYVDQELDINRLSDYDVDAIVPQSFLKDDS
IDNKVLTRSDKNRGKSDNVPSEEVVKKMKNYWRQLLNAKLITQRKFDNLT
KAERGGLSELDKAGFIKRQLVETRQITKHVAQILDSRMNTKYDENDKLIR
EVKVITLKSKLVSDFRKDFQFYKVREINNYHHAHDAYLNAVVGTALIKKY
PKLESEFVYGDYKVYDVRKMIAKSEQEIGKATAKYFFYSNIMNFFKTEIT
LANGEIRKRPLIETNGETGEIVWDKGRDFATVRKVLSMPQVNIVKKTEVQ
TGGFSKESILPKRNSDKLIARKKDWDPKKYGGFVSPTVAYSVLVVAKVEK
GKSKKLKSVKELLGITIMERSSFEKNPIDFLEAKGYKEVKKDLIIKLPKY
SLFELENGRKRMLASARELQKGNELALPSKYVNFLYLASHYEKLKGSPED
NEQKQLFVEQHKHYLDEIIEQISEFSKRVILADANLDKVLSAYNKHRDKP
IREQAENIIHLFTLTNLGAPAAFKYFDTTIDRKEYRSTKEVLDATLIHQS
ITGLYETRIDLSQLGGD

[0382] In some embodiments, the napDNAbp that functions with a non-canonical PAM sequence is an Argonaute protein. One example of such a nucleic acid programmable DNA binding protein is an Argonaute protein from Natronobacterium gregoryi (NgAgo). NgAgo is a ssDNA-guided endonuclease. NgAgo binds 5′ phosphorylated ssDNA of ˜24 nucleotides (gDNA) to guide it to its target site and will make DNA double-strand breaks at the gDNA site. In contrast to Cas9, the NgAgo-gDNA system does not require a proto spacer-adjacent motif (PAM). Using a nuclease inactive NgAgo (dNgAgo) can greatly expand the bases that may be targeted. The characterization and use of NgAgo have been described in Gao et al., Nat Biotechnol., 2016 July; 34(7):768-73. PubMed PMID: 27136078; Swarts et al., Nature. 507(7491) (2014):258-61; and Swarts et al., Nucleic Acids Res. 43(10) (2015):5120-9, each of which is incorporated herein by reference.

[0383] In some embodiments, the napDNAbp is a prokaryotic homolog of an Argonaute protein. Prokaryotic homologs of Argonaute proteins are known and have been described, for example, in Makarova K., et al., “Prokaryotic homologs of Argonaute proteins are predicted to function as key components of a novel system of defense against mobile genetic elements”, Biol Direct. 2009 Aug. 25; 4:29. doi: 10.1186/1745-6150-4-29, the entire contents of which is hereby incorporated by reference. In some embodiments, the napDNAbp is a Marinitoga piezophila Argunaute (MpAgo) protein. The CRISPR-associated Marinitoga piezophila Argunaute (MpAgo) protein cleaves single-stranded target sequences using 5′-phosphorylated guides. The 5′ guides are used by all known Argonautes. The crystal structure of an MpAgo-RNA complex shows a guide strand binding site comprising residues that block 5′ phosphate interactions. This data suggests the evolution of an Argonaute subclass with noncanonical specificity for a 5′-hydroxylated guide. See, e.g., Kaya et al., “A bacterial Argonaute with noncanonical guide RNA specificity”, Proc Natl Acad Sci USA. 2016 Apr. 12; 113(15):4057-62, the entire contents of which are hereby incorporated by reference). It should be appreciated that other argonaute proteins may be used, and are within the scope of this disclosure.

[0384] Some aspects of the disclosure provide Cas9 domains that have different PAM specificities. Typically, Cas9 proteins, such as Cas9 from S. pyogenes (spCas9), require a canonical NGG PAM sequence to bind a particular nucleic acid region. This may limit the ability to edit desired bases within a genome. In some embodiments, the base editing fusion proteins provided herein may need to be placed at a precise location, for example where a target base is placed within a 4 base region (e.g., a “editing window”), which is approximately 15 bases upstream of the PAM. See Komor, A. C., et al., “Programmable editing of a target base in genomic DNA without double-stranded DNA cleavage” Nature 533, 420-424 (2016), the entire contents of which are hereby incorporated by reference. Accordingly, in some embodiments, any of the fusion proteins provided herein may contain a Cas9 domain that is capable of binding a nucleotide sequence that does not contain a canonical (e.g., NGG) PAM sequence. Cas9 domains that bind to non-canonical PAM sequences have been described in the art and would be apparent to the skilled artisan. For example, Cas9 domains that bind non-canonical PAM sequences have been described in Kleinstiver, B. P., et al., “Engineered CRISPR-Cas9 nucleases with altered PAM specificities” Nature 523, 481-485 (2015); and Kleinstiver, B. P., et al., “Broadening the targeting range of Staphylococcus aureus CRISPR-Cas9 by modifying PAM recognition” Nature Biotechnology 33, 1293-1298 (2015); the entire contents of each are hereby incorporated by reference.

[0385] For example, a napDNAbp domain with altered PAM specificity, such as a domain with at least 80%, at least 85%, at least 90%, at least 95%, or at least 99% sequence identity with wild type Francisella novicida Cpf1 (D917, E1006, and D1255) (SEQ ID NO: 74), which has the following amino acid sequence:

(SEQ ID NO: 74)
MSIYQEFVNKYSLSKTLRFELIPQGKTLENIKARGLILDDEKRAKDYKKA
KQIIDKYHQFFIEEILSSVCISEDLLQNYSDVYFKLKKSDDDNLQKDFKS
AKDTIKKQISEYIKDSEKFKNLFNQNLIDAKKGQESDLILWLKQSKDNGI
ELFKANSDITDIDEALEIIKSFKGWTTYFKGFHENRKNVYSSNDIPTSII
YRIVDDNLPKFLENKAKYESLKDKAPEAINYEQIKKDLAEELTFDIDYKT
SEVNQRVFSLDEVFEIANFNNYLNQSGITKFNTIIGGKFVNGENTKRKGI
NEYINLYSQQINDKTLKKYKMSVLFKQILSDTESKSFVIDKLEDDSDVVT
TMQSFYEQIAAFKTVEEKSIKETLSLLFDDLKAQKLDLSKIYFKNDKSLT
DLSQQVFDDYSVIGTAVLEYITQQIAPKNLDNPSKKEQELIAKKTEKAKY
LSLETIKLALEEFNKHRDIDKQCRFEEILANFAAIPMIFDEIAQNKDNLA
QISIKYQNQGKKDLLQASAEDDVKAIKDLLDQTNNLLHKLKIFHISQSED
KANILDKDEHFYLVFEECYFELANIVPLYNKIRNYITQKPYSDEKFKLNF
ENSTLANGWDKNKEPDNTAILFIKDDKYYLGVMNKKNNKIFDDKAIKENK
GEGYKKIVYKLLPGANKMLPKVFFSAKSIKFYNPSEDILRIRNHSTHTKN
GSPQKGYEKFEFNIEDCRKFIDFYKQSISKHPEWKDFGFRFSDTQRYNSI
DEFYREVENQGYKLTFENISESYIDSVVNQGKLYLFQIYNKDFSAYSKGR
PNLHTLYWKALFDERNLQDVVYKLNGEAELFYRKQSIPKKITHPAKEAIA
NKNKDNPKKESVFEYDLIKDKRFTEDKFFFHCPITINFKSSGANKFNDEI
NLLLKEKANDVHILSIDRGERHLAYYTLVDGKGNIIKQDTFNIIGNDRMK
TNYHDKLAAIEKDRDSARKDWKKINNIKEMKEGYLSQVVHEIAKLVIEYN
AIVVFEDLNFGFKRGRFKVEKQVYQKLEKMLIEKLNYLVFKDNEFDKTGG
VLRAYQLTAPFETFKKMGKQTGIIYYVPAGFTSKICPVTGFVNQLYPKYE
SVSKSQEFFSKFDKICYNLDKGYFEFSFDYKNFGDKAAKGKWTIASFGSR
LINFRNSDKNHNWDTREVYPTKELEKLLKDYSIEYGHGECIKAAICGESD
KKFFAKLTSVLNTILQMRNSKTGTELDYLISPVADVNGNFFDSRQAPKNM
PQDADANGAYHIGLKGLMLLGRIKNNQEGKKLNLVIKNEEYFEFVQNRNN

[0386] An additional napDNAbp domain with altered PAM specificity, such as a domain having at least 80%, at least 85%, at least 90%, at least 95%, or at least 99% sequence identity with wild type Geobacillus thermodenitrificans Cas9 (SEQ ID NO: 75), which has the following amino acid sequence:

(SEQ ID NO: 75)
MKYKIGLDIGITSIGWAVINLDIPRIEDLGVRIFDRAENPKTGESLALPR
RLARSARRRLRRRKHRLERIRRLFVREGILTKEELNKLFEKKHEIDVWQL
RVEALDRKLNNDELARILLHLAKRRGFRSNRKSERTNKENSTMLKHIEEN
QSILSSYRTVAEMVVKDPKFSLHKRNKEDNYTNTVARDDLEREIKLIFAK
QREYGNIVCTEAFEHEYISIWASQRPFASKDDIEKKVGFCTFEPKEKRAP
KATYTFQSFTVWEHINKLRLVSPGGIRALTDDERRLIYKQAFHKNKITFH
DVRTLLNLPDDTRFKGLLYDRNTTLKENEKVRFLELGAYHKIRKAIDSVY
GKGAAKSFRPIDFDTFGYALTMFKDDTDIRSYLRNEYEQNGKRMENLADK
VYDEELIEELLNLSFSKFGHLSLKALRNILPYMEQGEVYSTACERAGYTF
TGPKKKQKTVLLPNIPPIANPVVMRALTQARKVVNAIIKKYGSPVSIHIE
LARELSQSFDERRKMQKEQEGNRKKNETAIRQLVEYGLTLNPTGLDIVKF
KLWSEQNGKCAYSLQPIEIERLLEPGYTEVDHVIPYSRSLDDSYTNKVLV
LTKENREKGNRTPAEYLGLGSERWQQFETFVLTNKQFSKKKRDRLLRLHY
DENEENEFKNRNLNDTRYISRFLANFIREHLKFADSDDKQKVYTVNGRIT
AHLRSRWNFNKNREESNLHHAVDAAIVACTTPSDIARVTAFYQRREQNKE
LSKKTDPQFPQPWPHFADELQARLSKNPKESIKALNLGNYDNEKLESLQP
VFVSRMPKRSITGAAHQETLRRYIGIDERSGKIQTVVKKKLSEIQLDKTG
HFPMYGKESDPRTYEAIRQRLLEHNNDPKKAFQEPLYKPKKNGELGPIIR
TIKIIDTTNQVIPLNDGKTVAYNSNIVRVDVFEKDGKYYCVPIYTIDMMK
GILPNKAIEPNKPYSEWKEMTEDYTFRFSLYPNDLIRIEFPREKTIKTAV
GEEIKIKDLFAYYQTIDSSNGGLSLVSHDNNFSLRSIGSRTLKRFEKYQV
DVLGNIYKVRGEKRVGVASSSHSKAGETIRPL

[0387] In some embodiments, the nucleic acid programmable DNA binding protein (napDNAbp) is a nucleic acid programmable DNA binding protein that does not require a canonical (NGG) PAM sequence. In some embodiments, the napDNAbp is an argonaute protein. One example of such a nucleic acid programmable DNA binding protein is an Argonaute protein from Natronobacterium gregoryi (NgAgo). NgAgo is a ssDNA-guided endonuclease. NgAgo binds 5′ phosphorylated ssDNA of ˜24 nucleotides (gDNA) to guide it to its target site and will make DNA double-strand breaks at the gDNA site. In contrast to Cas9, the NgAgo-gDNA system does not require a protospacer-adjacent motif (PAM). Using a nuclease inactive NgAgo (dNgAgo) can greatly expand the bases that may be targeted. The characterization and use of NgAgo have been described in Gao et al., Nat Biotechnol., 34(7): 768-73 (2016), PubMed PMID: 27136078; Swarts et al., Nature, 507(7491): 258-61 (2014); and Swarts et al., Nucleic Acids Res. 43(10) (2015): 5120-9, each of which is incorporated herein by reference. The sequence of Natronobacterium gregoryi Argonaute is provided in SEQ ID NO: 76.

[0388] The disclosed fusion proteins may comprise a napDNAbp domain having at least 80%, at least 85%, at least 90%, at least 95%, or at least 99% sequence identity with wild type Natronobacterium gregoryi Argonaute (SEQ ID NO: 76), which has the following amino acid sequence:

(SEQ ID NO: 76)
MTVIDLDSTTTADELTSGHTYDISVTLTGVYDNTDEQHPRMSLAFEQDNG
ERRYITLWKNTTPKDVFTYDYATGSTYIFTNIDYEVKDGYENLTATYQTT
VENATAQEVGTTDEDETFAGGEPLDHHLDDALNETPDDAETESDSGHVMT
SFASRDQLPEWTLHTYTLTATDGAKTDTEYARRTLAYTVRQELYTDHDAA
PVATDGLMLLTPEPLGETPLDLDCGVRVEADETRTLDYTTAKDRLLAREL
VEEGLKRSLWDDYLVRGIDEVLSKEPVLTCDEFDLHERYDLSVEVGHSGR
AYLHINFRHRFVPKLTLADIDDDNIYPGLRVKTTYRPRRGHIVWGLRDEC
ATDSLNTLGNQSVVAYHRNNQTPINTDLLDAIEAADRRVVETRRQGHGDD
AVSFPQELLAVEPNTHQIKQFASDGFHQQARSKTRLSASRCSEKAQAFAE
RLDPVRLNGSTVEFSSEFFTGNNEQQLRLLYENGESVLTFRDGARGAHPD
ETFSKGIVNPPESFEVAVVLPEQQADTCKAQWDTMADLLNQAGAPPTRSE
TVQYDAFSSPESISLNVAGAIDPSEVDAAFVVLPPDQEGFADLASPTETY
DELKKALANMGIYSQMAYFDRFRDAKIFYTRNVALGLLAAAGGVAFTTEH
AMPGDADMFIGIDVSRSYPEDGASGQINIAATATAVYKDGTILGHSSTRP
QLGEKLQSTDVRDIMKNAILGYQQVTGESPTHIVIHRDGFMNEDLDPATE
FLNEQGVEYDIVEIRKQPQTRLLAVSDVQYDTPVKSIAAINQNEPRATVA
TFGAPEYLATRDGGGLPRPIQIERVAGETDIETLTRQVYLLSQSHIQVHN
STARLPITTAYADQASTHATKGYLVQTGAFESNVGFL

[0389] In addition, any available methods may be utilized to obtain or construct a variant or mutant Cas9 protein. The term “mutation,” as used herein, refers to a substitution of a residue within a sequence, e.g., a nucleic acid or amino acid sequence, with another residue, or a deletion or insertion of one or more residues within a sequence. Mutations are typically described herein by identifying the original residue followed by the position of the residue within the sequence and by the identity of the newly substituted residue. Various methods for making the amino acid substitutions (mutations) provided herein are well known in the art, and are provided by, for example, Green and Sambrook, Molecular Cloning: A Laboratory Manual (4th ed., Cold Spring Harbor Laboratory Press, Cold Spring Harbor, N.Y. (2012)). Mutations can include a variety of categories, such as single base polymorphisms, microduplication regions, indel, and inversions, and is not meant to be limiting in any way. Mutations can include “loss-of-function” mutations which is the normal result of a mutation that reduces or abolishes a protein activity. Most loss-of-function mutations are recessive, because in a heterozygote the second chromosome copy carries an unmutated version of the gene coding for a fully functional protein whose presence compensates for the effect of the mutation. Mutations also embrace “gain-of-function” mutations, which is one which confers an abnormal activity on a protein or cell that is otherwise not present in a normal condition. Many gain-of-function mutations are in regulatory sequences rather than in coding regions, and can therefore have a number of consequences. For example, a mutation might lead to one or more genes being expressed in the wrong tissues, these tissues gaining functions that they normally lack. Because of their nature, gain-of-function mutations are usually dominant.

[0390] Mutations can be introduced into a reference Cas9 protein using site-directed mutagenesis. Older methods of site-directed mutagenesis known in the art rely on sub-cloning of the sequence to be mutated into a vector, such as an M13 bacteriophage vector, that allows the isolation of single-stranded DNA template. In these methods, one anneals a mutagenic primer (i.e., a primer capable of annealing to the site to be mutated but bearing one or more mismatched nucleotides at the site to be mutated) to the single-stranded template and then polymerizes the complement of the template starting from the 3′ end of the mutagenic primer. The resulting duplexes are then transformed into host bacteria and plaques are screened for the desired mutation. More recently, site-directed mutagenesis has employed PCR methodologies, which have the advantage of not requiring a single-stranded template. In addition, methods have been developed that do not require sub-cloning. Several issues must be considered when PCR-based site-directed mutagenesis is performed. First, in these methods it is desirable to reduce the number of PCR cycles to prevent expansion of undesired mutations introduced by the polymerase. Second, a selection must be employed in order to reduce the number of non-mutated parental molecules persisting in the reaction. Third, an extended-length PCR method is preferred in order to allow the use of a single PCR primer set. And fourth, because of the non-template-dependent terminal extension activity of some thermostable polymerases it is often necessary to incorporate an end-polishing step into the procedure prior to blunt-end ligation of the PCR-generated mutant product.

[0391] Mutations may also be introduced by directed evolution processes, such as phage-assisted continuous evolution (PACE) or phage-assisted noncontinuous evolution (PANCE). The term “phage-assisted continuous evolution (PACE),” as used herein, refers to continuous evolution that employs phage as viral vectors. The general concept of PACE technology has been described, for example, in International PCT Application, PCT/US2009/056194, filed Sep. 8, 2009, published as WO 2010/028347 on Mar. 11, 2010; International PCT Application, PCT/US2011/066747, filed Dec. 22, 2011, published as WO 2012/088381 on Jun. 28, 2012; U.S. application, U.S. Pat. No. 9,023,594, issued May 5, 2015, International PCT Application, PCT/US2015/012022, filed Jan. 20, 2015, published as WO 2015/134121 on Sep. 11, 2015, and International PCT Application, PCT/US2016/027795, filed Apr. 15, 2016, published as WO 2016/168631 on Oct. 20, 2016, the entire contents of each of which are incorporated herein by reference. Variant Cas9s may also be obtain by phage-assisted non-continuous evolution (PANCE),” which as used herein, refers to non-continuous evolution that employs phage as viral vectors. PANCE is a simplified technique for rapid in vivo directed evolution using serial flask transfers of evolving ‘selection phage’ (SP), which contain a gene of interest to be evolved, across fresh E. coli host cells, thereby allowing genes inside the host E. coli to be held constant while genes contained in the SP continuously evolve. Serial flask transfers have long served as a widely-accessible approach for laboratory evolution of microbes, and, more recently, analogous approaches have been developed for bacteriophage evolution. The PANCE system features lower stringency than the PACE system.

[0392] Any of the references noted above which relate to Cas9 or Cas9 equivalents are hereby incorporated by reference in their entireties, if not already stated so.

[0393] J. Divided napDNAbp Domains for Split PE Delivery

[0394] In various embodiments, the prime editors described herein may be delivered to cells as two or more fragments which become assembled inside the cell (either by passive assembly, or by active assembly, such as using split intein sequences) into a reconstituted prime editor. In some cases, the self assembly may be passive whereby the two or more prime editor fragments associate inside the cell covalently or non-covalently to reconstitute the prime editor. In other cases, the self-assembly may be catalyzed by dimerization domains installed on each of the fragments. Examples of dimerization domains are described herein. In still other cases, the self-assembly may be catalyzed by split intein sequences installed on each of the prime editor fragments.

[0395] Split PE delivery may be advantageous to address various size constraints of different delivery approaches. For example, delivery approaches may include virus-based delivery methods, messenger RNA-based delivery methods, or RNP-based delivery (ribonucleoprotein-based delivery). And, each of these methods of delivery may be more efficient and/or effective by dividing up the prime editor into smaller pieces. Once inside the cell, the smaller pieces can assemble into a functional prime editor. Depending on the means of splitting, the divided prime editor fragments can be reassembled in a non-covalent manner or a covalent manner to reform the prime editor. In one embodiment, the prime editor can be split at one or more split sites into two or more fragments. The fragments can be unmodified (other than being split). Once the fragments are delivered to the cell (e.g., by direct delivery of a ribonucleoprotein complex or by nucleic delivery—e.g., mRNA delivery or virus vector based delivery), the fragments can reassociate covalently or non-covalently to reconstitute the prime editor. In another embodiment, the prime editor can be split at one or more split sites into two or more fragments. Each of the fragments can be modified to comprise a dimerization domain, whereby each fragment that is formed is coupled to a dimerization domain. Once delivered or expressed within a cell, the dimerization domains of the different fragments associate and bind to one another, bringing the different prime editor fragments together to reform a functional prime editor. In yet another embodiment, the prime editor fragment may be modified to comprise a split intein. Once delivered or expressed within a cell, the split intein domains of the different fragments associate and bind to one another, and then undergo trans-splicing, which results in the excision of the split-intein domains from each of the fragments, and a concomitant formation of a peptide bond between the fragments, thereby restoring the prime editor.

[0396] In one embodiment, the prime editor can be delivered using a split-intein approach.

[0397] The location of the split site can be positioned between any one or more pair of residues in the prime editor and in any domains therein, including within the napDNAbp domain, the polymerase domain (e.g., RT domain), linker domain that joins the napDNAbp domain and the polymerase domain.

[0398] In one embodiment, depicted in FIG. 66, the prime editor (PE) is divided at a split site within the napDNAbp.

[0399] In certain embodiments, the napDNAbp is a canonical SpCas9 polypeptide of SEQ ID NO: 18, as follows:

| | | |
|---|---|---|
| SpCas9 | MDKKYSIGLDIGTNSVGWAVITDEYKVPSKKFKVLGN | SEQ ID NO: |
| Streptococcus | TDRHSIKKNLIGALLFDSGETAEATRLKRTARRRYTRR | 18 |
| pyogenes | KNRICYLQEIFSNEMAKVDDSFFHRLEESFLVEEDKKH | |
| M1 | ERHPIFGNIVDEVAYHEKYPTIYHLRKKLVDSTDKADL | |
| SwissProt | RLIYLALAHMIKFRGHFLIEGDLNPDNSDVDKLFIQLVQ | |
| Accession | TYNQLFEENPINASGVDAKAILSARLSKSRRLENLIAQL | |
| No. | PGEKKNGLFGNLIALSLGLTPNFKSNFDLAEDAKLQLS | |
| Q99ZW2 | KDTYDDDLDNLLAQIGDQYADLFLAAKNLSDAILLSDI | |
| Wild type | LRVNTEITKAPLSASMIKRYDEHHQDLTLLKALVRQQL | |
| 1368 AA | PEKYKEIFFDQSKNGYAGYIDGGASQEEFYKFIKPILEK | |
| | MDGTEELLVKLNREDLLRKQRTFDNGSIPHQIHLGELH | |
| | AILRRQEDFYPFLKDNREKIEKILTFRIPYYVGPLARGN | |
| | SRFAWMTRKSEETITPWNFEEVVDKGASAQSFIERMTN | |
| | FDKNLPNEKVLPKHSLLYEYFTVYNELTKVKYVTEGM | |
| | RKPAFLSGEQKKAIVDLLFKTNRKVTVKQLKEDYFKKI | |
| | ECFDSVETSGVEDRFNASLGTYHDLLKIIKDKDFLDNEE | |
| | NEDILEDIVLTLTLFEDREMIEERLKTYAHLFDDKVMK | |
| | QLKRRRYTGWGRLSRKLINGIRDKQSGKTILDFLKSDG | |
| | FANRNFMQLIHDDSLTFKEDIQKAQVSGQGDSLHEHIA | |
| | NLAGSPAIKKGILQTVKVVDELVKVMGRHKPENIVIEM | |
| | ARENQTTQKGQKNSRERMKRIEEGIKELGSQILKEHPV | |
| | ENTQLQNEKLYLYYLQNGRDMYVDQELDINRLSDYD | |
| | VDHIVPQSFLKDDSIDNKVLTRSDKNRGKSDNVPSEEV | |
| | VKKMKNYWRQLLNAKLITQRKFDNLTKAERGGLSEL | |
| | DKAGFIKRQLVETRQITKHVAQILDSRMNTKYDENDK | |
| | LIREVKVITLKSKLVSDFRKDFQFYKVREINNYHHAHD | |
| | AYLNAVVGTALIKKYPKLESEFVYGDYKVYDVRKMIA | |
| | KSEQEIGKATAKYFFYSNIMNFFKTEITLANGEIRKRPLI | |
| | ETNGETGEIVWDKGRDFATVRKVLSMPQVNIVKKTEV | |
| | QTGGFSKESILPKRNSDKLIARKKDWDPKKYGGFDSPT | |
| | VAYSVLVVAKVEKGKSKKLKSVKELLGITIMERSSFEK | |
| | NPIDFLEAKGYKEVKKDLIIKLPKYSLFELENGRKRML | |
| | ASAGELQKGNELALPSKYVNFLYLASHYEKLKGSPED | |
| | NEQKQLFVEQHKHYLDEIIEQISEFSKRVILADANLDKV | |
| | LSAYNKHRDKPIREQAENIIHLFTLTNLGAPAAFKYFDT | |
| | TIDRKRYTSTKEVLDATLIHQSITGLYETRIDLSQLGGD | |

[0400] In certain embodiments, the SpCas9 is split into two fragments at a split site located between residues 1 and 2, or 2 and 3, or 3 and 4, or 4 and 5, or 5 and 6, or 6 and 7, or 7 and 8, or 8 and 9, or 9 and 10, or between any two pair of residues located anywhere between residues 1-10, 10-20, 20-30, 30-40, 40-50, 50-60, 60-70, 70-80, 80-90, 90-100, 100-200, 200-300, 300-400, 400-500, 500-600, 600-700, 700-800, 800-900, 1000-1100, 1100-1200, 1200-1300, or 1300-1368 of canonical SpCas9 of SEQ ID NO: 18.

[0401] In certain embodiments, a napDNAbp is split into two fragments at a split site that is located at a pair of residue that corresponds to any two pair of residues located anywhere between positions 1-10, 10-20, 20-30, 30-40, 40-50, 50-60, 60-70, 70-80, 80-90, 90-100, 100-200, 200-300, 300-400, 400-500, 500-600, 600-700, 700-800, 800-900, 1000-1100, 1100-1200, 1200-1300, or 1300-1368 of canonical SpCas9 of SEQ ID NO: 18.

[0402] In certain embodiments, the SpCas9 is split into two fragments at a split site located between residues 1 and 2, or 2 and 3, or 3 and 4, or 4 and 5, or 5 and 6, or 6 and 7, or 7 and 8, or 8 and 9, or 9 and 10, or between any two pair of residues located anywhere between residues 1-10, 10-20, 20-30, 30-40, 40-50, 50-60, 60-70, 70-80, 80-90, 90-100, 100-200, 200-300, 300-400, 400-500, 500-600, 600-700, 700-800, 800-900, 1000-1100, 1100-1200, 1200-1300, or 1300-1368 of canonical SpCas9 of SEQ ID NO: 18. In certain embodiments, the split site is located one or more polypeptide bond sites (i.e., a “split site or split-intein split site”), fused to a split intein, and then delivered to cells as separately-encoded fusion proteins. Once the split-intein fusion proteins (i.e., protein halves) are expressed within a cell, the proteins undergo trans-splicing to form a complete or whole PE with the concomitant removal of the joined split-intein sequences.

[0403] For example, as shown in FIG. 66, the N-terminal extein can be fused to a first split-intein (e.g., N intein) and the C-terminal extein can be fused to a second split-intein (e.g., C intein). The N-terminal extein becomes fused to the C-terminal extein to reform a whole prime editor fusion protein comprising an napDNAbp domain and a polymerase domain (e.g., RT domain) upon the self-association of the N intein and the C intein inside the cell, followed by their self-excision, and the concomitant formation of a peptide bond between the N-terminal extein and C-terminal extein portions of a whole prime editor (PE).

[0404] To take advantage of a split-PE delivery strategy using split-inteins, the prime editor needs to be divided at one or more split sites to create at least two separate halves of a prime editor, each of which may be rejoined inside a cell if each half is fused to a split-intein sequence.

[0405] In certain embodiments, the prime editor is split at a single split site. In certain other embodiments, the prime editor is split at two split sites, or three split sites, or four split sites, or more.

[0406] In a preferred embodiment, the prime editor is split at a single split site to create two separate halves of a prime editor, each of which can be fused to a split intein sequence

[0407] An exemplary split intein is the Ssp DnaE intein, which comprises two subunits, namely, DnaE-N and DnaE-C. The two different subunits are encoded by separate genes, namely dnaE-n and dnaE-c, which encode the DnaE-N and DnaE-C subunits, respectively. DnaE is a naturally occurring split intein in Synechocytis sp. PCC6803 and is capable of directing trans-splicing of two separate proteins, each comprising a fusion with either DnaE-N or DnaE-C.

[0408] Additional naturally occurring or engineered split-intein sequences are known in the or can be made from whole-intein sequences described herein or those available in the art. Examples of split-intein sequences can be found in Stevens et al., “A promiscuous split intein with expanded protein engineering applications,” PNAS, 2017, Vol. 114: 8538-8543; Iwai et al., “Highly efficient protein trans-splicing by a naturally split DnaE intein from Nostc punctiforme, FEBS Lett, 580: 1853-1858, each of which are incorporated herein by reference. Additional split intein sequences can be found, for example, in WO 2013/045632, WO 2014/055782, WO 2016/069774, and EP2877490, the contents each of which are incorporated herein by reference.

[0409] In addition, protein splicing in trans has been described in vivo and in vitro (Shingledecker, et al., Gene 207:187 (1998), Southworth, et al., EMBO J. 17:918 (1998); Mills, et al., Proc. Natd. Acad. Sci. USA, 95:3543-3548 (1998); Lew, et al., J. Biol. Chem., 273:15887-15890 (1998); Wu, et al., Biochim. Biophys. Acta 35732:1 (1998b), Yamazaki, et al., J. Am. Chem. Soc. 120:5591 (1998), Evans, et al., J. Biol. Chem. 275:9091 (2000); Otomo, et al., Biochemistry 38:16040-16044 (1999); Otomo, et al., J. Biolmol. NMR 14:105-114 (1999); Scott, et al., Proc. Natd. Acad. Sci. USA 96:13638-13643 (1999)) and provides the opportunity to express a protein as to two inactive fragments that subsequently undergo ligation to form a functional product, e.g., as shown in FIGS. 66 and 67 with regard to the formation of a complete PE fusion protein from two separately-expressed halves.

[0410] In various embodiments described herein, the continuous evolution methods (e.g., PACE) may be used to evolve a first portion of a base editor. A first portion could include a single component or domain, e.g., a Cas9 domain, a deaminase domain, or a UGI domain. The separately evolved component or domain can be then fused to the remaining portions of the base editor within a cell by separately express both the evolved portion and the remaining non-evolved portions with split-intein polypeptide domains. The first portion could more broadly include any first amino acid portion of a base editor that is desired to be evolved using a continuous evolution method described herein. The second portion would in this embodiment refer to the remaining amino acid portion of the base editor that is not evolved using the herein methods. The evolved first portion and the second portion of the base editor could each be expressed with split-intein polypeptide domains in a cell. The natural protein splicing mechanisms of the cell would reassemble the evolved first portion and the non-evolved second portion to form a single fusion protein evolved base editor. The evolved first portion may comprise either the N- or C-terminal part of the single fusion protein. In an analogous manner, use of a second orthogonal trans-splicing intein pair could allow the evolved first portion to comprise an internal part of the single fusion protein.

[0411] Thus, any of the evolved and non-evolved components of the base editors herein described may be expressed with split-intein tags in order to facilitate the formation of a complete base editor comprising the evolved and non-evolved component within a cell.

[0412] The mechanism of the protein splicing process has been studied in great detail (Chong, et al., J. Biol. Chem. 1996, 271, 22159-22168; Xu, M-Q & Perler, F. B. EMBO Journal, 1996, 15, 5146-5153) and conserved amino acids have been found at the intein and extein splicing points (Xu, et al., EMBO Journal, 1994, 13 5517-522). The constructs described herein contain an intein sequence fused to the 5′-terminus of the first gene (e.g., the evolved portion of the base editor). Suitable intein sequences can be selected from any of the proteins known to contain protein splicing elements. A database containing all known inteins can be found on the World Wide Web (Perler, F. B. Nucleic Acids Research, 1999, 27, 346-347). The intein sequence is fused at the 3′ end to the 5′ end of a second gene. For targeting of this gene to a certain organelle, a peptide signal can be fused to the coding sequence of the gene. After the second gene, the intein-gene sequence can be repeated as often as desired for expression of multiple proteins in the same cell. For multi-intein containing constructs, it may be useful to use intein elements from different sources. After the sequence of the last gene to be expressed, a transcription termination sequence must be inserted. In one embodiment, a modified intein splicing unit is designed so that it can both catalyze excision of the exteins from the inteins as well as prevent ligation of the exteins. Mutagenesis of the C-terminal extein junction in the Pyrococcus species GB-D DNA polymerase was found to produce an altered splicing element that induces cleavage of exteins and inteins but prevents subsequent ligation of the exteins (Xu, M-Q & Perler, F. B. EMBO Journal, 1996, 15, 5146-5153). Mutation of serine 538 to either an alanine or glycine induced cleavage but prevented ligation. Mutation of equivalent residues in other intein splicing units should also prevent extein ligation due to the conservation of amino acids at the C-terminal extein junction to the intein. A preferred intein not containing an endonuclease domain is the Mycobacterium xenopi GyrA protein (Telenti, et al. J. Bacteriol. 1997, 179, 6378-6382). Others have been found in nature or have been created artificially by removing the endonuclease domains from endonuclease containing inteins (Chong, et al. J. Biol. Chem. 1997, 272, 15587-15590). In a preferred embodiment, the intein is selected so that it consists of the minimal number of amino acids needed to perform the splicing function, such as the intein from the Mycobacterium xenopi GyrA protein (Telenti, A., et al., J. Bacteriol. 1997, 179, 6378-6382). In an alternative embodiment, an intein without endonuclease activity is selected, such as the intein from the Mycobacterium xenopi GyrA protein or the Saccharaomyces cerevisiae VMA intein that has been modified to remove endonuclease domains (Chong, 1997). Further modification of the intein splicing unit may allow the reaction rate of the cleavage reaction to be altered allowing protein dosage to be controlled by simply modifying the gene sequence of the splicing unit.

[0413] Inteins can also exist as two fragments encoded by two separately transcribed and translated genes. These so-called split inteins self-associate and catalyze protein-splicing activity in trans. Split inteins have been identified in diverse cyanobacteria and archaea (Caspi et al, Mol Microbiol. 50: 1569-1577 (2003); Choi J. et al, J Mol Biol. 556: 1093-1106 (2006.); Dassa B. et al, Biochemistry. 46:322-330 (2007.); Liu X. and Yang J., J Biol Chem. 275:26315-26318 (2003); Wu H. et al.

[0414] Proc Natl Acad Sci USA. 5:9226-9231 (1998.); and Zettler J. et al, FEBS Letters. 553:909-914 (2009)), but have not been found in eukaryotes thus far. Recently, a bioinformatic analysis of environmental metagenomic data revealed 26 different loci with a novel genomic arrangement. At each locus, a conserved enzyme coding region is interrupted by a split intein, with a freestanding endonuclease gene inserted between the sections coding for intein subdomains. Among them, five loci were completely assembled: DNA helicases (gp41-1, gp41-8); Inosine-5′-monophosphate dehydrogenase (IMPDH-1); and Ribonucleotide reductase catalytic subunits (NrdA-2 and NrdJ-1). This fractured gene organization appears to be present mainly in phages (Dassa et al, Nucleic Acids Research. 57:2560-2573 (2009)).

[0415] The split intein Npu DnaE was characterized as having the highest rate reported for the protein trans-splicing reaction. In addition, the Npu DnaE protein splicing reaction is considered robust and high-yielding with respect to different extein sequences, temperatures from 6 to 37° C., and the presence of up to 6M Urea (Zettler J. et al, FEBS Letters. 553:909-914 (2009); Iwai I. et al, FEBS Letters 550: 1853-1858 (2006)). As expected, when the Cysl Ala mutation at the N-domain of these inteins was introduced, the initial N to S-acyl shift and therefore protein splicing was blocked. Unfortunately, the C-terminal cleavage reaction was also almost completely inhibited. The dependence of the asparagine cyclization at the C-terminal splice junction on the acyl shift at the N-terminal scissile peptide bond seems to be a unique property common to the naturally split DnaE intein alleles (Zettler J. et al. FEBS Letters. 555:909-914 (2009)).

[0416] The mechanism of protein splicing typically has four steps [29-30]: 1) an N—S or N—O acyl shift at the intein N-terminus, which breaks the upstream peptide bond and forms an ester bond between the N-extein and the side chain of the intein's first amino acid (Cys or Ser); 2) a transesterification relocating the N-extein to the intein C-terminus, forming a new ester bond linking the N-extein to the side chain of the C-extein's first amino acid (Cys, Ser, or Thr); 3) Asn cyclization breaking the peptide bond between the intein and the C-extein; and 4) a S—N or O—N acyl shift that replaces the ester bond with a peptide bond between the N-extein and C-extein.

[0417] Protein trans-splicing, catalyzed by split inteins, provides an entirely enzymatic method for protein ligation [31]. A split-intein is essentially a contiguous intein (e.g. a mini-intein) split into two pieces named N-intein and C-intein, respectively. The N-intein and C-intein of a split intein can associate non-covalently to form an active intein and catalyze the splicing reaction essentially in same way as a contiguous intein does. Split inteins have been found in nature and also engineered in laboratories [31-35]. As used herein, the term “split intein” refers to any intein in which one or more peptide bond breaks exists between the N-terminal and C-terminal amino acid sequences such that the N-terminal and C-terminal sequences become separate molecules that can non-covalently reassociate, or reconstitute, into an intein that is functional for trans-splicing reactions. Any catalytically active intein, or fragment thereof, may be used to derive a split intein for use in the methods of the invention. For example, in one aspect the split intein may be derived from a eukaryotic intein. In another aspect, the split intein may be derived from a bacterial intein. In another aspect, the split intein may be derived from an archaeal intein. Preferably, the split intein so-derived will possess only the amino acid sequences essential for catalyzing trans-splicing reactions.

[0418] As used herein, the “N-terminal split intein (In)” refers to any intein sequence that comprises an N-terminal amino acid sequence that is functional for trans-splicing reactions. An In thus also comprises a sequence that is spliced out when trans-splicing occurs. An In can comprise a sequence that is a modification of the N-terminal portion of a naturally occurring intein sequence. For example, an In can comprise additional amino acid residues and/or mutated residues so long as the inclusion of such additional and/or mutated residues does not render the In non-functional in trans-splicing. Preferably, the inclusion of the additional and/or mutated residues improves or enhances the trans-splicing activity of the In.

[0419] As used herein, the “C-terminal split intein (Ic)” refers to any intein sequence that comprises a C-terminal amino acid sequence that is functional for trans-splicing reactions. In one aspect, the Ic comprises 4 to 7 contiguous amino acid residues, at least 4 amino acids of which are from the last β-strand of the intein from which it was derived. An Ic thus also comprises a sequence that is spliced out when trans-splicing occurs. An Ic can comprise a sequence that is a modification of the C-terminal portion of a naturally occurring intein sequence. For example, an Ic can comprise additional amino acid residues and/or mutated residues so long as the inclusion of such additional and/or mutated residues does not render the In non-functional in trans-splicing. Preferably, the inclusion of the additional and/or mutated residues improves or enhances the trans-splicing activity of the Ic.

[0420] In some embodiments of the invention, a peptide linked to an Ic or an In can comprise an additional chemical moiety including, among others, fluorescence groups, biotin, polyethylene glycol (PEG), amino acid analogs, unnatural amino acids, phosphate groups, glycosyl groups, radioisotope labels, and pharmaceutical molecules. In other embodiments, a peptide linked to an Ic can comprise one or more chemically reactive groups including, among others, ketone, aldehyde, Cys residues and Lys residues. The N-intein and C-intein of a split intein can associate non-covalently to form an active intein and catalyze the splicing reaction when an “intein-splicing polypeptide (ISP)” is present. As used herein, “intein-splicing polypeptide (ISP)” refers to the portion of the amino acid sequence of a split intein that remains when the Ic, In, or both, are removed from the split intein. In certain embodiments, the In comprises the ISP. In another embodiment, the Ic comprises the ISP. In yet another embodiment, the ISP is a separate peptide that is not covalently linked to In nor to Ic.

[0421] Split inteins may be created from contiguous inteins by engineering one or more split sites in the unstructured loop or intervening amino acid sequence between the −12 conserved beta-strands found in the structure of mini-inteins [25-28]. Some flexibility in the position of the split site within regions between the beta-strands may exist, provided that creation of the split will not disrupt the structure of the intein, the structured beta-strands in particular, to a sufficient degree that protein splicing activity is lost.

[0422] In protein trans-splicing, one precursor protein consists of an N-extein part followed by the N-intein, another precursor protein consists of the C-intein followed by a C-extein part, and a trans-splicing reaction (catalyzed by the N- and C-inteins together) excises the two intein sequences and links the two extein sequences with a peptide bond. Protein trans-splicing, being an enzymatic reaction, can work with very low (e.g. micromolar) concentrations of proteins and can be carried out under physiological conditions.

### [2] Other Programmable Nucleases

[0423] In various embodiments described herein, the prime editors comprise a napDNAbp, such as a Cas9 protein. These proteins are “programmable” by way of their becoming complexed with a guide RNA (or a PEgRNA, as the case may be), which guides the Cas9 protein to a target site on the DNA which possess a sequence that is complementary to the spacer portion of the gRNA (or PEgRNA) and also which possesses the required PAM sequence. However, in certain embodiment envisioned here, the napDNAbp may be substituted with a different type of programmable protein, such as a zinc finger nuclease or a transcription activator-like effector nuclease (TALEN).

[0424] FIG. 1J depicts such a variation of prime editing contemplated herein that replaces the napDNAbp (e.g., SpCas9 nickase) with any programmable nuclease domain, such as zinc finger nucleases (ZFN) or transcription activator-like effector nucleases (TALEN). As such, it is contemplated that suitable nucleases do not necessarily need to be “programmed” by a nucleic acid targeting molecule (such as a guide RNA), but rather, may be programmed by defining the specificity of a DNA-binding domain, such as and in particular, a nuclease. Just as in prime editing with napDNAbp moities, it is preferable that such alternative programmable nucleases be modified such that only one strand of a target DNA is cut. In other words, the programmable nucleases should function as nickases, preferably. Once a programmable nuclease is selected (e.g., a ZFN or a TALEN), then additional functionalities may be engineered into the system to allow it to operate in accordance with a prime editing-like mechanism. For example, the programmable nucleases may be modified by coupling (e.g., via a chemical linker) an RNA or DNA extension arm thereto, wherein the extension arm comprises a primer binding site (PBS) and a DNA synthesis template. The programmable nuclease may also be coupled (e.g., via a chemical or amino acid linker) to a polymerase, the nature of which will depend upon whether the extension arm is DNA or RNA. In the case of an RNA extension arm, the polymerase can be an RNA-dependent DNA polymerase (e.g., reverse transcriptase). In the case of a DNA extension arm, the polymerase can be a DNA-dependent DNA polymerase (e.g., a prokaryotic polymerase, including Pol I, Pol II, or Pol III, or a eukaryotic polymerase, including Pol a, Pol b, Pol g, Pol d, Pol e, or Pol z). The system may also include other functionalities added as fusions to the programmable nucleases, or added in trans to facilitate the reaction as a whole (e.g., (a) a helicase to unwind the DNA at the cut site to make the cut strand with the 3′ end available as a primer, (b) a FEN1 to help remove the endogenous strand on the cut strand to drive the reaction towards replacement of the endogenous strand with the synthesized strand, or (c) a nCas9:gRNA complex to create a second site nick on the opposite strand, which may help drive the integration of the synthesize repair through favored cellular repair of the non-edited strand). In an analogous manner to prime editing with a napDNAbp, such a complex with an otherwise programmable nuclease could be used to synthesize and then install a newly synthesized replacement strand of DNA carrying an edit of interest permanently into a target site of DNA.

[0425] Suitable alternative programmable nucleases are well known in the art which may be used in place of a napDNAbp:gRNA complex to construct an alternative prime editor system that can be programmed to selectively bind a target site of DNA, and which can be further modified in the manner described above to co-localize a polymerase and an RNA or DNA extension arm comprising a primer binding site and a DNA synthesis template to specific nick site. For example, and as represented in FIG. 1J, Transcription Activator-Like Effector Nucleases (TALENs) may be used as the programmable nuclease in the prime editing methods and compositions of matter described herein. TALENS are artificial restriction enzymes generated by fusing the TAL effector DNA binding domain to a DNA cleavage domain. These reagents enable efficient, programmable, and specific DNA cleavage and represent powerful tools for genome editing in situ. Transcription activator-like effectors (TALEs) can be quickly engineered to bind practically any DNA sequence. The term TALEN, as used herein, is broad and includes a monomeric TALEN that can cleave double stranded DNA without assistance from another TALEN. The term TALEN is also used to refer to one or both members of a pair of TALENs that are engineered to work together to cleave DNA at the same site. TALENs that work together may be referred to as a left-TALEN and a right-TALEN, which references the handedness of DNA. See U.S. Ser. No. 12/965,590; U.S. Ser. No. 13/426,991 (U.S. Pat. No. 8,450,471); U.S. Ser. No. 13/427,040 (U.S. Pat. No. 8,440,431); U.S. Ser. No. 13/427,137 (U.S. Pat. No. 8,440,432); and U.S. Ser. No. 13/738,381, all of which are incorporated by reference herein in their entirety. In addition, TALENS are described in WO 2015/027134, U.S. Pat. No. 9,181,535, Boch et al., “Breaking the Code of DNA Binding Specificity of TAL-Type III Effectors”, Science, vol. 326, pp. 1509-1512 (2009), Bogdanove et al., TAL Effectors: Customizable Proteins for DNA Targeting, Science, vol. 333, pp. 1843-1846 (2011), Cade et al., “Highly efficient generation of heritable zebrafish gene mutations using homo- and heterodimeric TALENs”, Nucleic Acids Research, vol. 40, pp. 8001-8010 (2012), and Cermak et al., “Efficient design and assembly of custom TALEN and other TAL effector-based constructs for DNA targeting”, Nucleic Acids Research, vol. 39, No. 17, e82 (2011), each of which are incorporated herein by reference.

[0426] As represented in FIG. 1J, zinc finger nucleases may also be used as alternative programmable nucleases for use in prime editing in place of napDNAbps, such as Cas9 nickases. Like with TALENS, the ZFN proteins may be modified such that they function as nickases, i.e., engineering the ZFN such that it cleaves only one strand of the target DNA in a manner similar to the napDNAbp used with the prime editors described herein. ZFN proteins have been extensively described in the art, for example, in Carroll et al., “Genome Engineering with Zinc-Finger Nucleases,” Genetics, August 2011, Vol. 188: 773-782; Durai et al., “Zinc finger nucleases: custom-designed molecular scissors for genome engineering of plant and mammalian cells,” Nucleic Acids Res, 2005, Vol. 33: 5978-90; and Gaj et al., “ZFN, TALEN, and CRISPR/Cas-based methods for genome engineering,” Trends Biotechnol. 2013, Vol. 31: 397-405, each of which are incorporated herein by reference in their entireties.

### [3] Polymerases (e.g., Reverse Transcriptases)

[0427] In various embodiments, the prime editor (PE) system disclosed herein includes a polymerase (e.g., DNA-dependent DNA polymerase or RNA-dependent DNA polymerase, such as, reverse transcriptase), or a variant thereof, which can be provided as a fusion protein with a napDNAbp or other programmable nuclease, or provide in trans.

[0428] Any polymerase may be used in the prime editors disclosed herein. The polymerases may be wild type polymerases, functional fragments, mutants, variants, or truncated variants, and the like. The polymerases may include wild type polymerases from eukaryotic, prokaryotic, archael, or viral organisms, and/or the polymerases may be modified by genetic engineering, mutagenesis, directed evolution-based processes. The polymerases may include T7 DNA polymerase, T5 DNA polymerase, T4 DNA polymerase, Klenow fragment DNA polymerase, DNA polymerase III and the like. The polymerases may also be thermostable, and may include Taq, Tne, Tma, Pfu, Tfl, Tth, Stoffel fragment, VENT® and DEEPVENT® DNA polymerases, KOD, Tgo, JDF3, and mutants, variants and derivatives thereof (see U.S. Pat. Nos. 5,436,149; 4,889,818; 4,965,185; 5,079,352; 5,614,365; 5,374,553; 5,270,179; 5,047,342; 5,512,462; WO 92/06188; WO 92/06200; WO 96/10640; Barnes, W. M., Gene 112:29-35 (1992); Lawyer, F. C., et al., PCR Meth. Appl. 2:275-287 (1993); Flaman, J.-M, et al., Nuc. Acids Res. 22(15):3259-3260 (1994), each of which are incorporated by reference). For synthesis of longer nucleic acid molecules (e.g, nucleic acid molecules longer than about 3-5 Kb in length), at least two DNA polymerases can be employed. In certain embodiments, one of the polymerases can be substantially lacking a 3′ exonuclease activity and the other may have a 3′ exonuclease activity. Such pairings may include polymerases that are the same or different. Examples of DNA polymerases substantially lacking in 3′ exonuclease activity include, but are not limited to, Taq, Tne(exo-), Tma(exo-), Pfu(exo-), Pwo(exo-), exo-KOD and Tth DNA polymerases, and mutants, variants and derivatives thereof.

[0429] Preferably, the polymerase usable in the prime editors disclosed herein are “template-dependent” polymerase (since the polymerases are intended to rely on the DNA synthesis template to specify the sequence of the DNA strand under synthesis during prime editing. As used herein, the term “template DNA molecule” refers to that strand of a nucleic acid from which a complementary nucleic acid strand is synthesized by a DNA polymerase, for example, in a primer extension reaction of the DNA synthesis template of a PEgRNA.

[0430] As used herein, the term “template dependent manner” is intended to refer to a process that involves the template dependent extension of a primer molecule (e.g., DNA synthesis by DNA polymerase). The term “template dependent manner” refers to polynucleotide synthesis of RNA or DNA wherein the sequence of the newly synthesized strand of polynucleotide is dictated by the well-known rules of complementary base pairing (see, for example, Watson, J. D. et al., In: Molecular Biology of the Gene, 4th Ed., W. A. Benjamin, Inc., Menlo Park, Calif. (1987)). The term “complementary” refers to the broad concept of sequence complementarity between regions of two polynucleotide strands or between two nucleotides through base-pairing. It is known that an adenine nucleotide is capable of forming specific hydrogen bonds (“base pairing”) with a nucleotide which is thymine or uracil. Similarly, it is known that a cytosine nucleotide is capable of base pairing with a guanine nucleotide. As such, in the case of prime editing, it can be said that the single strand of DNA synthesized by the polymerase of the prime editor against the DNA synthesis template is said to be “complementary” to the sequence of the DNA synthesis template.

[0431] A. Exemplary Polymerases

[0432] In various embodiments, the prime editors described herein comprise a polymerase. The disclosure contemplates any wild type polymerase obtained from any naturally-occurring organism or virus, or obtained from a commercial or non-commercial source. In addition, the polymerases usable in the prime editors of the disclosure can include any naturally-occurring mutant polymerase, engineered mutant polymerase, or other variant polymerase, including truncated variants that retain function. The polymerases usable herein may also be engineered to contain specific amino acid substitutions, such as those specifically disclosed herein. In certain preferred embodiments, the polymerases usable in the prime editors of the disclosure are template-based polymerases, i.e., they synthesize nucleotide sequences in a template-dependent manner.

[0433] A polymerase is an enzyme that synthesizes a nucleotide strand and which may be used in connection with the prime editor systems described herein. The polymerases are preferrably “template-dependent” polymerases (i.e., a polymerase which synthesizes a nucleotide strand based on the order of nucleotide bases of a template strand). In certain configurations, the polymerases can also be a “template-independent” (i.e., a polymerase which synthesizes a nucleotide strand without the requirement of a template strand). A polymerase may also be further categorized as a “DNA polymerase” or an “RNA polymerase.” In various embodiments, the prime editor system comprises a DNA polymerase. In various embodiments, the DNA polymerase can be a “DNA-dependent DNA polymerase” (i.e., whereby the template molecule is a strand of DNA). In such cases, the DNA template molecule can be a PEgRNA, wherein the extension arm comprises a strand of DNA. In such cases, the PEgRNA may be referred to as a chimeric or hybrid PEgRNA which comprises an RNA portion (i.e., the guide RNA components, including the spacer and the gRNA core) and a DNA portion (i.e., the extension arm). In various other embodiments, the DNA polymerase can be an “RNA-dependent DNA polymerase” (i.e., whereby the template molecule is a strand of RNA). In such cases, the PEgRNA is RNA, i.e., including an RNA extension. The term “polymerase” may also refer to an enzyme that catalyzes the polymerization of nucleotide (i.e., the polymerase activity). Generally, the enzyme will initiate synthesis at the 3′-end of a primer annealed to a polynucleotide template sequence (e.g., such as a primer sequence annealed to the primer binding site of a PEgRNA), and will proceed toward the 5′ end of the template strand. A “DNA polymerase” catalyzes the polymerization of deoxynucleotides. As used herein in reference to a DNA polymerase, the term DNA polymerase includes a “functional fragment thereof”. A “functional fragment thereof” refers to any portion of a wild-type or mutant DNA polymerase that encompasses less than the entire amino acid sequence of the polymerase and which retains the ability, under at least one set of conditions, to catalyze the polymerization of a polynucleotide. Such a functional fragment may exist as a separate entity, or it may be a constituent of a larger polypeptide, such as a fusion protein.

[0434] In some embodiments, the polymerases can be from bacteriophage. Bacteriophage DNA polymerases are generally devoid of 5′ to 3′ exonuclease activity, as this activity is encoded by a separate polypeptide. Examples of suitable DNA polymerases are T4, T7, and phi29 DNA polymerase. The enzymes available commercially are: T4 (available from many sources e.g., Epicentre) and T7 (available from many sources, e.g. Epicentre for unmodified and USB for 3′ to 5′ exo T7 “Sequenase” DNA polymerase).

[0435] The other embodiments, the polymerases are archaeal polymerases. There are 2 different classes of DNA polymerases which have been identified in archaea: 1. Family B/pol I type (homologs of Pfu from Pyrococcus furiosus) and 2. pol II type (homologs of P. furiosus DP1/DP2 2-subunit polymerase). DNA polymerases from both classes have been shown to naturally lack an associated 5′ to 3′ exonuclease activity and to possess 3′ to 5′ exonuclease (proofreading) activity. Suitable DNA polymerases (pol I or pol II) can be derived from archaea with optimal growth temperatures that are similar to the desired assay temperatures.

[0436] Thermostable archaeal DNA polymerases are isolated from Pyrococcus species (furiosus, species GB-D, woesii, abysii, horikoshii), Thermococcus species (kodakaraensis KOD1, litoralis, species 9 degrees North-7, species JDF-3, gorgonarius), Pyrodictium occultum, and Archaeoglobus fulgidus.

[0437] Polymerases may also be from eubacterial species. There are 3 c1 asses of eubacterial DNA polymerases, pol I, II, and III. Enzymes in the Pol I DNA polymerase family possess 5′ to 3′ exonuclease activity, and certain members also exhibit 3′ to 5′ exonuclease activity. Pol II DNA polymerases naturally lack 5′ to 3′ exonuclease activity, but do exhibit 3′ to 5′ exonuclease activity. Pol III DNA polymerases represent the major replicative DNA polymerase of the cell and are composed of multiple subunits. The pol III catalytic subunit lacks 5′ to 3′ exonuclease activity, but in some cases 3′ to 5′ exonuclease activity is located in the same polypeptide.

[0438] There are a variety of commercially available Pol I DNA polymerases, some of which have been modified to reduce or abolish 5′ to 3′ exonuclease activity.

[0439] Suitable thermostable pol I DNA polymerases can be isolated from a variety of thermophilic eubacteria, including Thermus species and Thermotoga maritima such as Thermus aquaticus (Taq), Thermus thermophilus (Tth) and Thermotoga maritima (Tma UlTma).

[0440] Additional eubacteria related to those listed above are described in Thermophilic Bacteria (Kristjansson, J. K., ed.) CRC Press, Inc., Boca Raton, Fla., 1992.

[0441] The invention further provides for chimeric or non-chimeric DNA polymerases that are chemically modified according to methods disclosed in U.S. Pat. Nos. 5,677,152, 6,479,264 and 6,183,998, the contents of which are hereby incorporated by reference in their entirety.

[0442] Additional archaea DNA polymerases related to those listed above are described in the following references: Archaea: A Laboratory Manual (Robb, F. T. and Place, A. R., eds.), Cold Spring Harbor Laboratory Press, Cold Spring Harbor, N.Y., 1995 and Thermophilic Bacteria (Kristjansson, J. K., ed.) CRC Press, Inc., Boca Raton, Fla., 1992.

[0443] B. Exemplary Reverse Transcriptases

[0444] In various embodiments, the prime editors described herein comprise a reverse transcriptase as the polymerase. The disclosure contemplates any wild type reverse transcriptase obtained from any naturally-occurring organism or virus, or obtained from a commercial or non-commercial source. In addition, the reverse transcriptases usable in the prime editors of the disclosure can include any naturally-occurring mutant RT, engineered mutant RT, or other variant RT, including truncated variants that retain function. The RTs may also be engineered to contain specific amino acid substitutions, such as those specifically disclosed herein.

[0445] Reverse transcriptases are multi-functional enzymes typically with three enzymatic activities including RNA- and DNA-dependent DNA polymerization activity, and an RNaseH activity that catalyzes the cleavage of RNA in RNA-DNA hybrids. Some mutants of reverse transcriptases have disabled the RNaseH moiety to prevent unintended damage to the mRNA. These enzymes that synthesize complementary DNA (cDNA) using mRNA as a template were first identified in RNA viruses. Subsequently, reverse transcriptases were isolated and purified directly from virus particles, cells or tissues. (e.g., see Kacian et al., 1971, Biochim. Biophys. Acta 46: 365-83; Yang et al., 1972, Biochem. Biophys. Res. Comm. 47: 505-11; Gerard et al., 1975, J. Virol. 15: 785-97; Liu et al., 1977, Arch. Virol. 55 187-200; Kato et al., 1984, J. Virol. Methods 9: 325-39; Luke et al., 1990, Biochem. 29: 1764-69 and Le Grice et al., 1991, J. Virol. 65: 7004-07, each of which are incorporated by reference). More recently, mutants and fusion proteins have been created in the quest for improved properties such as thermostability, fidelity and activity. Any of the wild type, variant, and/or mutant forms of reverse transcriptase which are known in the art or which can be made using methods known in the art are contemplated herein.

[0446] The reverse transcriptase (RT) gene (or the genetic information contained therein) can be obtained from a number of different sources. For instance, the gene may be obtained from eukaryotic cells which are infected with retrovirus, or from a number of plasmids which contain either a portion of or the entire retrovirus genome. In addition, messenger RNA-like RNA which contains the RT gene can be obtained from retroviruses. Examples of sources for RT include, but are not limited to, Moloney murine leukemia virus (M-MLV or MLVRT); human T-cell leukemia virus type 1 (HTLV-1); bovine leukemia virus (BLV); Rous Sarcoma Virus (RSV); human immunodeficiency virus (HIV); yeast, including Saccharomyces, Neurospora, Drosophila; primates; and rodents. See, for example, Weiss, et al., U.S. Pat. No. 4,663,290 (1987); Gerard, G. R., DNA:271-79 (1986); Kotewicz, M. L., et al., Gene 35:249-58 (1985); Tanese, N., et al., Proc. Natl. Acad. Sci. (USA):4944-48 (1985); Roth, M. J., at al., J. Biol. Chem. 260:9326-35 (1985); Michel, F., et al., Nature 316:641-43 (1985); Akins, R. A., et al., Cell 47:505-16 (1986), EMBO J. 4:1267-75 (1985); and Fawcett, D. F., Cell 47:1007-15 (1986) (each of which are incorporated herein by reference in their entireties).

### Wild Type RTs

[0447] Exemplary enzymes for use with the herein disclosed prime editors can include, but are not limited to, M-MLV reverse transcriptase and RSV reverse transcriptase. Enzymes having reverse transcriptase activity are commercially available. In certain embodiments, the reverse transcriptase provided in trans to the other components of the prime editor (PE) system. That is, the reverse transcriptase is expressed or otherwise provided as an individual component, i.e., not as a fusion protein with a napDNAbp.

[0448] A person of ordinary skill in the art will recognize that wild type reverse transcriptases, including but not limited to, Moloney Murine Leukemia Virus (M-MLV); Human Immunodeficiency Virus (HIV) reverse transcriptase and avian Sarcoma-Leukosis Virus (ASLV) reverse transcriptase, which includes but is not limited to Rous Sarcoma Virus (RSV) reverse transcriptase, Avian Myeloblastosis Virus (AMV) reverse transcriptase, Avian Erythroblastosis Virus (AEV) Helper Virus MCAV reverse transcriptase, Avian Myelocytomatosis Virus MC29 Helper Virus MCAV reverse transcriptase, Avian Reticuloendotheliosis Virus (REV-T) Helper Virus REV-A reverse transcriptase, Avian Sarcoma Virus UR2 Helper Virus UR2AV reverse transcriptase, Avian Sarcoma Virus Y73 Helper Virus YAV reverse transcriptase, Rous Associated Virus (RAV) reverse transcriptase, and Myeloblastosis Associated Virus (MAV) reverse transcriptase may be suitably used in the subject methods and composition described herein.

[0449] Exemplary wild type RT enzymes are as follows:

| DESCRIPTION | SEQUENCE |
|---|---|
| REVERSE | TLNIEDEYRLHETSKEPDVSLGSTWLSDFPQAWAETGGMGLA |
| TRANSCRIPTASE | VRQAPLIIPLKATSTPVSIKQYPMSQEARLGIKPHIQRLLDQGIL |
| (M-MLV RT) WILD | VPCQSPWNTPLLPVKKPGTNDYRPVQDLREVNKRVEDIHPTV |
| TYPE | PNPYNLLSGLPPSHQWYTVLDLKDAFFCLRLHPTSQPLFAFEW |
| MOLONEY MURINE | RDPEMGISGQLTWTRLPQGFKNSPTLFDEALHRDLADFRIQHP |
| LEUKEMIA VIRUS | DLILLQYVDDLLLAATSELDCQQGTRALLQTLGNLGYRASAK |
| USED IN PE1 (PRIME | KAQICQKQVKYLGYLLKEGQRWLTEARKETVMGQPTPKTPR |
| EDITOR 1 FUSION | QLREFLGTAGFCRLWIPGFAEMAAPLYPLTKTGTLFNWGPDQ |
| PROTEIN | QKAYQEIKQALLTAPALGLPDLTKPFELFVDEKQGYAKGVLTQ |
| DISCLOSED | KLGPWRRPVAYLSKKLDPVAAGWPPCLRMVAAIAVLTKDAGK |
| HEREIN) | LTMGQPLVILAPHAVEALVKQPPDRWLSNARMTHYQALLLDT |
| | DRVQFGPVVALNPATLLPLPEEGLQHNCLDILAEAHGTRPDLT |
| | DQPLPDADHTWYTDGSSLLQEGQRKAGAAVTTETEVIWAKA |
| | LPAGTSAQRAELIALTQALKMAEGKKLNVYTDSRYAFATAHIH |
| | GEIYRRRGLLTSEGKEIKNKDEILALLKALFLPKRLSIIHCPGHQ |
| | KGHSAEARGNRMADQAARKAAITETPDTSTLLIENSSP(SEQ |
| | ID NO: 89) |
| REVERSE | AFPLERPDWDYTTQAGRNHLVHYRQLLLAGLQNAGRSPTNL |
| TRANSCRIPTASE | AKVKGITQGPNESPSAFLERLKEAYRRYTPYDPEDPGQETNVS |
| MOLONEY MURINE | MSFIWQSAPDIGRKLGRLEDLKSKTLGDLVREAEKIFNKRETP |
| LEUKEMIA VIRUS | EEREERIRRETEEKEERRRTVDEQKEKERDRRRHREMSKLLAT |
| REF SEQ. | VVIGQEQDRQEGERKRPQLDKDQCAYCKEKGHWAKDCPKKP |
| AAA66622.1 | RGPRGPRPQTSLLTLGDXGGQGQDPPPEPRITLKVGGQPVTFL |
| | VDTGAQHSVLTQNPGPLSDKSAWVQGATGGKRYRWTTDRKV |
| | HLATGKVTHSFLHVPDCPYPLLGRDLLTKLKAQIHFEGSGAQV |
| | VGPMGQPLQVLTLNIEDEYRLHETSKEPDVSLGFTWLSDFPQA |
| | WAESGGMGLAVRQAPLIIPLKATSTPVSIKQYPMSQEARLGIKP |
| | HIQRLLDQGILVPCQSPWNTPLLPVKKPGTNDYRPVQDLREV |
| | NKRVEDIHPTVPNPYNLLSGLPPSHQWYTVLDLKDAFFCLRL |
| | HPTSQPLFAFEWRDPEMGISGQLTWTRLPQGFKNSPTLFDEAL |
| | HRDLADFR(SEQ ID NO: 90) |
| REVERSE | TLQLEEEYRLFEPESTQKQEMDIWLKNFPQAWAETGGMGTAH |
| TRANSCRIPTASE | CQAPVLIQLKATATPISIRQYPMPHEAYQGIKPHIRRMLDQGIL |
| FELINE LEUKEMIA | KPCQSPWNTPLLPVKKPGTEDYRPVQDLREVNKRVEDIHPTV |
| VIRUS | PNPYNLLSTLPPSHPWYTVLDLKDAFFCLRLHSESQLLFAFEW |
| REF SEQ. NP955579.1 | RDPEIGLSGQLTWTRLPQGFKNSPTLFDEALHSDLADFRVRYP |
| | ALVLLQYVDDLLLAAATRTECLEGTKALLETLGNKGYRASAK |
| | KAQICLQEVTYLGYSLKDGQRWLTKARKEAILSIPVPKNSRQV |
| | REFLGTAGYCRLWIPGFAELAAPLYPLTRPGTLFQWGTEQQLA |
| | FEDIKKALLSSPALGLPDITKPFELFIDENSGFAKGVLVQKLGP |
| | WKRPVAYLSKKLDTVASGWPPCLRMVAAIAILVKDAGKLTLG |
| | QPLTILTSHPVEALVRQPPNKWLSNARMTHYQAMLLDAERVH |
| | FGPTVSLNPATLLPLPSGGNHHDCLQILAETHGTRPDLTDQPLP |
| | DADLTWYTDGSSFIRNGEREAGAAVTTESEVIWAAPLPPGTSA |
| | QRAELIALTQALKMAEGKKLTVYTDSRYAFATTHVHGEIYRRR |
| | GLLTSEGKEIKNKNEILALLEALFLPKRLSIIHCPGHQKGDSPQ |
| | AKGNRLADDTAKKAATETHSSLTVL |
| | SEQ ID NO: 91) |
| REVERSE | PISPIETVPVKLKPGMDGPKVKQWPLTEEKIKALVEICTEMEKE |
| TRANSCRIPTASE | GKISKIGPENPYNTPVFAIKKKDSTKWRKLVDFRELNKRTQDF |
| HIV-1 RT, CHAIN A | WEVQLGIPHPAGLKKKKSVTVLDVGDAYFSVPLDEDFRKYTA |
| REF SEQ. ITL3-A | FTIPSINNETPGIRYQYNVLPQGWKGSPAIFQSSMTKILEPFRKQ |
| | NPDIVIYQYMDDLYVGSDLEIGQHRTKIEELRQHLLRWGLTTP |
| | DKKHQKEPPFLWMGYELHPDKWTVQPIVLPEKDSWTVNDIQ |
| | KLVGKLNWASQIYPGIKVRQLXKLLRGTKALTEVIPLTEEAEL |
| | ELAENREILKEPVHGVYYDPSKDLIAEIQKQGQGQWTYQIYQ |
| | EPFKNLKTGKYARMRGAHTNDVKQLTEAVQKITTESIVIWGK |
| | TPKFKLPIQKETWETWWTEYWQATWIPEWEFVNTPPLVKLW |
| | YQLEKEPIVGAETFYVDGAANRETKLGKAGYVTNRGRQKVV |
| | TLTDTTNQKTELQAIYLALQDSGLEVNIVTDSQYALGIIQAQPD |
| | QSESELVNQIIEQLIKKEKVYLAWVPAHKGIGGNEQVDKLVSA |
| | GIRKV(SEQ ID NO: 92) |
| | SEE MARTINELLI ET AL., VIROLOGY, 1990, 174(1): |
| | 135-144, WHICH IS INCORPORATED BY REFERENCE |
| REVERSE | PISPIETVPVKLKPGMDGPKVKQWPLTEEKIKALVEICTEMEKE |
| TRANSCRIPTASE | GKISKIGPENPYNTPVFAIKKKDSTKWRKLVDFRELNKRTQDF |
| HIV-1 RT, CHAIN B | WEVQLGIPHPAGLKKKKSVTVLDVGDAYFSVPLDEDFRKYTA |
| REF SEQ. ITL3-B | FTIPSINNETPGIRYQYNVLPQGWKGSPAIFQSSMTKILEPFRKQ |
| | NPDIVIYQYMDDLYVGSDLEIGQHRTKIEELRQHLLRWGLTTP |
| | DKKHQKEPPFLWMGYELHPDKWTVQPIVLPEKDSWTVNDIQ |
| | KLVGKLNWASQIYPGIKVRQLCKLLRGTKALTEVIPLTEEAELE |
| | LAENREILKEPVHGVYYDPSKDLIAEIQKQGQGQWTYQIYQEP |
| | FKNLKTGKYARMRGAHTNDVKQLTEAVQKITTESIVIWGKTP |
| | KFKLPIQKETWETWWTEYWQATWIPEWEFVNTPPLVKLWYQ |
| | LEKEPIVGAETF(SEQ ID NO: 93) |
| | SEE STAMMERS ET AL., J. MOL. BIOL., 1994, |
| | 242(4): 586-588, WHICH IS INCORPORATED BY |
| | REFERENCE |
| REVERSE | TVALHLAIPLKWKPNHTPVWIDQWPLPEGKLVALTQLVEKEL |
| TRANSCRIPTASE | QLGHIEPSLSCWNTPVFVIRKASGSYRLLHDLRAVNAKLVPFG |
| ROUS SARCOMA | AVQQGAPVLSALPRGWPLMVLDLKDCFFSIPLAEQDREAFAF |
| VIRUS RT | TLPSVNNQAPARRFQWKVLPQGMTCSPTICQLIVGQILEPLRL |
| REF SEQ. ACL14945 | KHPSLRMLHYMDDLLLAASSHDGLEAAGEEVISTLERAGFTIS |
| | PDKVQKEPGVQYLGYKLGSTYAAPVGLVAEPRIATLWDVQKL |
| | VGSLQWLRPALGIPPRLRGPFYEQLRGSDPNEAREWNLDMK |
| | MAWREIVQLSTTAALERWDPALPLEGAVARCEQGAIGVLGQG |
| | LSTHPRPCLWLFSTQPTKAFTAWLEVLTLLITKLRASAVRTFGK |
| | EVDILLLPACFRDELPLPEGILLALRGFAGKIRSSDTPSIFDIARP |
| | LHVSLKVRVTDHPVPGPTVFTDASSSTHKGVVVWREGPRWEI |
| | KEIADLGASVQQLEARAVAMALLLWPTTPTNVVTDSAFVAKM |
| | LLKMGQEGVPSTAAAFILEDALSQRSAMAAVLHVRSHSEVPG |
| | FFTEGNDVADSQATFQAYPLREAKDLHTALHIGPRALSKACNI |
| | SMQQAREVVQTCPHCNSAPALEAGVNPRGLGPLQIWQTDFTL |
| | EPRMAPRSWLAVTVDTASSAIVVTQHGRVTSVAAQHHWATVI |
| | AVLGRPKAIKTDNGSCFTSKSTREWLARWGIAHTTGIPGNSQG |
| | QAMVERANRLLKDKIRVLAEGDGFMKRIPTSKQGELLAKAM |
| | YALNHFERGENTKTPIQKHWRPTVLTEGPPVKIRIETGEWEKG |
| | WNVLVWGRGYAAVKNRDTDKVIWVPSRKVKPDIAQKDEVT |
| | KKDEASPLFA(SEQ ID NO: 94) |
| | SEE YASUKAWA ET AL., J. BIOCHEM. 2009, 145(3): |
| | 315-324, WHICH IS INCORPORATED BY REFERENCE |
| REVERSE | MMDHLLQKTQIQNQTEQVMNITNPNSIYIKGRLYFKGYKKIEL |
| TRANSCRIPTASE | HCFVDTGASLCIASKFVIPEEHWINAERPIMVKIADGSSITINKV |
| CAULIFLOWER | CRDIDLIIAGEIFHIPTVYQQESGIDFIIGNNFCQLYEPFIQFTDRV |
| MOSAIC VIRUS RT | IFTKDRTYPVHIAKLTRAVRVGTEGFLESMKKRSKTQQPEPVNI |
| REF SEQ. AGT42196 | STNKIAILSEGRRLSEEKLFITQQRMQKIEELLEKVCSENPLDP |
| | NKTKQWMKASIKLSDPSKAIKVKPMKYSPMDREEFDKQIKEL |
| | LDLKVIKPSKSPHMAPAFLVNNEAEKRRGKKRMVVNYKAMN |
| | KATVGDAYNLPNKDELLTLIRGKKIFSSFDCKSGFWQVLLDQD |
| | SRPLTAFTCPQGHYEWNVVPFGLKQAPSIFQRHMDEAFRVFR |
| | KFCCVYVDDILVFSNNEEDHLLHVAMILQKCNQHGIILSKKKA |
| | QLFKKKINFLGLEIDEGTHKPQGHILEHINKFPDTLEDKKQLQR |
| | FLGILTYASDYIPKLAQIRKPLQAKLKENVPWKWTKEDTLYM |
| | QKVKKNLQGFPPLHHPLPEEKLIIETDASDDYWGGMLKAIKIN |
| | EGTNTELICRYASGSFKAAEKNYHSNDKETLAVINTIKKFSIYL |
| | TPVHFLIRTDNTHFKSFVNLNYKGDSKLGRNIRWQAWLSHYS |
| | FDVEHIKGTDNHFADFLSREFNRVNS(SEQ ID NO: 95) |
| | SEE FARZADFAR ET AL., VIRUS GENES, 2013, 47(2): |
| | 347-356, WHICH IS INCORPORATED BY REFERENCE |
| REVERSE | MKEKISKIDKNFYTDIFIKTSFQNEFEAGGVIPPIAKNQVSTISN |
| TRANSCRIPTASE | KNKTFYSLAHSSPHYSIQTRIEKFLLKNIPLSASSFAFRKERSYL |
| KLEBSIELLA | HYLEPHTQNVKYCHLDIVSFFHSIDVNIVRDTFSVYFSDEFLVK |
| PNEUMONIA | EKQSLLDAFMASVTLTAELDGVEKTFIPMGFKSSPSISNIIFRKI |
| REF SEQ. RFF81513.1 | DILIQKFCDKNKITYTRYADDLLFSTKKENNILSSTFFINEISSIL |
| | SINKFKLNKSKYLYKEGTISLGGYVIENILKDNSSGNIRLSSSKL |
| | NPLYKALYEIKKGSSSKHICIKVFNLKLKRFIYKKNKEKFEAKF |
| | YSSQLKNKLLGYRSYLLSFVIFHKKYKCINPIFLEKCVFLISEIE |
| | SIMNRKF(SEQ ID NO: 96) |
| REVERSE | MKITSNNVTAVINGKGWHSINWKKCHQHVKTIQTRIAKAACN |
| TRANSCRIPTASE | QQWRTVGRLQRLLVRSFSARALAVKRVTENSGRKTPGVDGQI |
| ESCERICHIA COLI | WSTPESKWEAIFKLRRKGYKPLPLKRVFIPKSNGKKRPLGIPV |
| RT | MLDRAMQALHLLGLEPVSETNADHNSYGFRPARCTADAIQQ |
| REF SEQ. TGH57013 | VCNMYSSRNASKWVLEGDIKGCFEHISHEWLLENIPMDKQIL |
| | RNWLKAGIIEKSIFSKTLSGTPQGGIISPVLANMALDGLERLLQ |
| | NRFGRNRLI(SEQ ID NO: 97) |
| REVERSE | MSKIKINYEKYHIKPFPHFDQRIKVNKKVKENLQNPFYIAAHS |
| TRANSCRIPTASE | FYPFIHYKKISYKFKNGTLSSPKERDIFYSGHMDGYIYKHYGEI |
| BACILLUS SUBTILIS | LNHKYNNTCIGKGIDHVSLAYRNNKMGKSNIHFAAEVINFISE |
| RT | QQQAFIFVSDFSSYFDSLDHAILKEKLIEVLEEQDKLSKDWWN |
| REF SEQ. QB J66766 | VFKHITRYNWVEKEEVISDLECTKEKIARDKKSRERYYTPAEF |
| | REFRKRVNIKSNDTGVGIPQGTAISAVLANVYAIDLDQKLNQY |
| | ALKYGGIYRRYSDDIIMVLPMTSDGQDPSNDHVSFIKSVVKRN |
| | KVTMGDSKTSVLYYANNNIYEDYQRKRESKMDYLGFSFDGM |
| | TVKIREKSLFKYYHRTYKKINSINWASVKKEKKVGRKKLYLL |
| | YSHLGRNYKGHGNFISYCKKAHAVFEGNKKIESLINQQIKRH |
| | WKKIQKRLVDV(SEQ ID NO: 98) |
| EUBACTERIUM | DTSNLMEQILSSDNLNRAYLQVVRNKGAEGVDGMKYTELKE |
| RECTALE GROUP II | HLAKNGETIKGQLRTRKYKPQPARRVEIPKPDGGVRNLGVPT |
| INTRON RT | VTDRFIQQAIAQVLTPIYEEQFHDHSYGFRPNRCAQQAILTALN |
| | IMNDGNDWIVDIDLEKFFDTVNHDKLMTLIGRTIKDGDVISIV |
| | RKYLVSGIMIDDEYEDSIVGTPQGGNLSPLLANIMLNELDKEM |
| | EKRGLNFVRYADDCIIMVGSEMSANRVMRNISRFIEEKLGLKV |
| | NMTKSKVDRPSGLKYLGFGFYFDPRAHQFKAKPHAKSVAKF |
| | KKRMKELTCRSWGVSNSYKVEKLNQLIRGWINYFKIGSMKTL |
| | CKELDSRIRYRLRMCIWKQWKTPQNQEKNLVKLGIDRNTARR |
| | VAYTGKRIAYVCNKGAVNVAISNKRLASFGLISMLDYYIEKCV |
| | TC(SEQ ID NO: 99) |
| GEOBACILLUS | ALLERILARDNLITALKRVEANQGAPGIDGVSTDQLRDYIRAH |
| STEAROTHERMOPHILUS | WSTIHAQLLAGTYRPAPVRRVEIPKPGGGTRQLGIPTVVDRLIQ |
| GROUP II | QAILQELTPIFDPDFSSSSFGFRPGRNAHDAVRQAQGYIQEGYR |
| INTRON RT | YVVDMDLEKFFDRVNHDILMSRVARKVKDKRVLKLIRAYLQA |
| | GVMIEGVKVQTEEGTPQGGPLSPLLANILLDDLDKELEKRGL |
| | KFCRYADDCNIYVKSLRAGQRVKQSIQRFLEKTLKLKVNEEKS |
| | AVDRPWKRAFLGFSFTPERKARIRLAPRSIQRLKQRIRQLTNPN |
| | WSISMPERIHRVNQYVMGWIGYFRLVETPSVLQTIEGWIRRRL |
| | RLCQWLQWKRVRTRIRELRALGLKETAVMEIANTRKGAWRTT |
| | KTPQLHQALGKTYWTAQGLKSLTQR(SEQ ID NO: 100) |

### Variant and Error-Prone RTs

[0450] Reverse transcriptases are essential for synthesizing complementary DNA (cDNA) strands from RNA templates. Reverse transcriptases are enzymes composed of distinct domains that exhibit different biochemical activities. The enzymes catalyze the synthesis of DNA from an RNA template, as follows: In the presence of an annealed primer, reverse transcriptase binds to an RNA template and initiates the polymerization reaction. RNA-dependent DNA polymerase activity synthesizes the complementary DNA (cDNA) strand, incorporating dNTPs. RNase H activity degrades the RNA template of the DNA:RNA complex. Thus, reverse transcriptases comprise (a) a binding activity that recognizes and binds to a RNA/DNA hybrid, (b) an RNA-dependent DNA polymerase activity, and (c) an RNase H activity. In addition, reverse transcriptases generally are regarded as having various attributes, including their thermostability, processivity (rate of dNTP incorporation), and fidelity (or error-rate). The reverse transcriptase variants contemplated herein may include any mutations to reverse transcriptase that impacts or changes any one or more of these enzymatic activities (e.g., RNA-dependent DNA polymerase activity, RNase H activity, or DNA/RNA hybrid-binding activity) or enzyme properties (e.g., thermostability, processivity, or fidelity). Such variants may be available in the art in the public domain, available commercially, or may be made using known methods of mutagenesis, including directed evolutionary processes (e.g., PACE or PANCE).

[0451] In various embodiments, the reverse transcriptase may be a variant reverse transcriptase. As used herein, a “variant reverse transcriptase” includes any naturally occurring or genetically engineered variant comprising one or more mutations (including singular mutations, inversions, deletions, insertions, and rearrangements) relative to a reference sequences (e.g., a reference wild type sequence). RT naturally have several activities, including an RNA-dependent DNA polymerase activity, ribonuclease H activity, and DNA-dependent DNA polymerase activity. Collectively, these activities enable the enzyme to convert single-stranded RNA into double-stranded cDNA. In retroviruses and retrotransposons, this cDNA can then integrate into the host genome, from which new RNA copies can be made via host-cell transcription. Variant RT's may comprise a mutation which impacts one or more of these activities (either which reduces or increases these activities, or which eliminates these activities all together). In addition, variant RTs may comprise one or more mutations which render the RT more or less stable, less prone to aggregation, and facilitates purification and/or detection, and/or other the modification of properties or characteristics.

[0452] A person of ordinary skill in the art will recognize that variant reverse transcriptases derived from other reverse transcriptases, including but not limited to Moloney Murine Leukemia Virus (M-MLV); Human Immunodeficiency Virus (HIV) reverse transcriptase and avian Sarcoma-Leukosis Virus (ASLV) reverse transcriptase, which includes but is not limited to Rous Sarcoma Virus (RSV) reverse transcriptase, Avian Myeloblastosis Virus (AMV) reverse transcriptase, Avian Erythroblastosis Virus (AEV) Helper Virus MCAV reverse transcriptase, Avian Myelocytomatosis Virus MC29 Helper Virus MCAV reverse transcriptase, Avian Reticuloendotheliosis Virus (REV-T) Helper Virus REV-A reverse transcriptase, Avian Sarcoma Virus UR2 Helper Virus UR2AV reverse transcriptase, Avian Sarcoma Virus Y73 Helper Virus YAV reverse transcriptase, Rous Associated Virus (RAV) reverse transcriptase, and Myeloblastosis Associated Virus (MAV) reverse transcriptase may be suitably used in the subject methods and composition described herein.

[0453] One method of preparing variant RTs is by genetic modification (e.g., by modifying the DNA sequence of a wild-type reverse transcriptase). A number of methods are known in the art that permit the random as well as targeted mutation of DNA sequences (see for example, Ausubel et. al. Short Protocols in Molecular Biology (1995) 3.sup.rd Ed. John Wiley & Sons, Inc.). In addition, there are a number of commercially available kits for site-directed mutagenesis, including both conventional and PCR-based methods. Examples include the QuikChange Site-Directed Mutagenesis Kits (AGILENT®), the Q5© Site-Directed Mutagenesis Kit (NEW ENGLAND BIOLABS®), and GeneArt™ Site-Directed Mutagenesis System (THERMOFISHER SCIENTIFIC®).

[0454] In addition, mutant reverse transcriptases may be generated by insertional mutation or truncation (N-terminal, internal, or C-terminal insertions or truncations) according to methodologies known to one skilled in the art. The term “mutation,” as used herein, refers to a substitution of a residue within a sequence, e.g., a nucleic acid or amino acid sequence, with another residue, or a deletion or insertion of one or more residues within a sequence. Mutations are typically described herein by identifying the original residue followed by the position of the residue within the sequence and by the identity of the newly substituted residue. Various methods for making the amino acid substitutions (mutations) provided herein are well known in the art, and are provided by, for example, Green and Sambrook, Molecular Cloning: A Laboratory Manual (4th ed., Cold Spring Harbor Laboratory Press, Cold Spring Harbor, N.Y. (2012)). Mutations can include a variety of categories, such as single base polymorphisms, microduplication regions, indel, and inversions, and is not meant to be limiting in any way. Mutations can include “loss-of-function” mutations which is the normal result of a mutation that reduces or abolishes a protein activity. Most loss-of-function mutations are recessive, because in a heterozygote the second chromosome copy carries an unmutated version of the gene coding for a fully functional protein whose presence compensates for the effect of the mutation. Mutations also embrace “gain-of-function” mutations, which is one which confers an abnormal activity on a protein or cell that is otherwise not present in a normal condition. Many gain-of-function mutations are in regulatory sequences rather than in coding regions, and can therefore have a number of consequences. For example, a mutation might lead to one or more genes being expressed in the wrong tissues, these tissues gaining functions that they normally lack. Because of their nature, gain-of-function mutations are usually dominant.

[0455] Older methods of site-directed mutagenesis known in the art rely on sub-cloning of the sequence to be mutated into a vector, such as an M13 bacteriophage vector, that allows the isolation of single-stranded DNA template. In these methods, one anneals a mutagenic primer (i.e., a primer capable of annealing to the site to be mutated but bearing one or more mismatched nucleotides at the site to be mutated) to the single-stranded template and then polymerizes the complement of the template starting from the 3′ end of the mutagenic primer. The resulting duplexes are then transformed into host bacteria and plaques are screened for the desired mutation.

[0456] More recently, site-directed mutagenesis has employed PCR methodologies, which have the advantage of not requiring a single-stranded template. In addition, methods have been developed that do not require sub-cloning. Several issues must be considered when PCR-based site-directed mutagenesis is performed. First, in these methods it is desirable to reduce the number of PCR cycles to prevent expansion of undesired mutations introduced by the polymerase. Second, a selection must be employed in order to reduce the number of non-mutated parental molecules persisting in the reaction. Third, an extended-length PCR method is preferred in order to allow the use of a single PCR primer set. And fourth, because of the non-template-dependent terminal extension activity of some thermostable polymerases it is often necessary to incorporate an end-polishing step into the procedure prior to blunt-end ligation of the PCR-generated mutant product.

[0457] Methods of random mutagenesis, which will result in a panel of mutants bearing one or more randomly situated mutations, exist in the art. Such a panel of mutants may then be screened for those exhibiting the desired properties, for example, increased stability, relative to a wild-type reverse transcriptase.

[0458] An example of a method for random mutagenesis is the so-called “error-prone PCR method.” As the name implies, the method amplifies a given sequence under conditions in which the DNA polymerase does not support high fidelity incorporation. Although the conditions encouraging error-prone incorporation for different DNA polymerases vary, one skilled in the art may determine such conditions for a given enzyme. A key variable for many DNA polymerases in the fidelity of amplification is, for example, the type and concentration of divalent metal ion in the buffer. The use of manganese ion and/or variation of the magnesium or manganese ion concentration may therefore be applied to influence the error rate of the polymerase.

[0459] In various aspects, the RT of the prime editors may be an “error-prone” reverse transcriptase variant. Error-prone reverse transcriptases that are known and/or available in the art may be used. It will be appreciated that reverse transcriptases naturally do not have any proofreading function; thus the error rate of reverse transcriptase is generally higher than DNA polymerases comprising a proofreading activity. The error-rate of any particular reverse transcriptase is a property of the enzyme's “fidelity,” which represents the accuracy of template-directed polymerization of DNA against its RNA template. An RT with high fidelity has a low-error rate. Conversely, an RT with low fidelity has a high-error rate. The fidelity of M-MLV-based reverse transcriptases are reported to have an error rate in the range of one error in 15,000 to 27,000 nucleotides synthesized. See Boutabout et al., “DNA synthesis fidelity by the reverse transcriptase of the yeast retrotransposon Ty 1,” Nucleic Acids Res, 2001, 29: 2217-2222, which is incorporated by reference. Thus, for purposes of this application, those reverse transcriptases considered to be “error-prone” or which are considered to have an “error-prone fidelity” are those having an error rate that is less than one error in 15,000 nucleotides synthesized.

[0460] Error-prone reverse transcriptase also may be created through mutagenesis of a starting RT enzyme (e.g., a wild type M-MLV RT). The method of mutagenesis is not limited and may include directed evolution processes, such as phage-assisted continuous evolution (PACE) or phage-assisted noncontinuous evolution (PANCE). The term “phage-assisted continuous evolution (PACE),” as used herein, refers to continuous evolution that employs phage as viral vectors. The general concept of PACE technology has been described, for example, in International PCT Application, PCT/US2009/056194, filed Sep. 8, 2009, published as WO 2010/028347 on Mar. 11, 2010; International PCT Application, PCT/US2011/066747, filed Dec. 22, 2011, published as WO 2012/088381 on Jun. 28, 2012; U.S. application, U.S. Pat. No. 9,023,594, issued May 5, 2015, International PCT Application, PCT/US2015/012022, filed Jan. 20, 2015, published as WO 2015/134121 on Sep. 11, 2015, and International PCT Application, PCT/US2016/027795, filed Apr. 15, 2016, published as WO 2016/168631 on Oct. 20, 2016, the entire contents of each of which are incorporated herein by reference.

[0461] Error-prone reverse transcriptases may also be obtain by phage-assisted non-continuous evolution (PANCE),” which as used herein, refers to non-continuous evolution that employs phage as viral vectors. PANCE is a simplified technique for rapid in vivo directed evolution using serial flask transfers of evolving ‘selection phage’ (SP), which contain a gene of interest to be evolved, across fresh E. coli host cells, thereby allowing genes inside the host E. coli to be held constant while genes contained in the SP continuously evolve. Serial flask transfers have long served as a widely-accessible approach for laboratory evolution of microbes, and, more recently, analogous approaches have been developed for bacteriophage evolution. The PANCE system features lower stringency than the PACE system.

[0462] Other error-prone reverse transcriptases have been described in the literature, each of which are contemplated for use in the herein methods and compositions. For example, error-prone reverse transcriptases have been described in Bebenek et al., “Error-prone Polymerization by HIV-1 Reverse Transcriptase,” J Biol Chem, 1993, Vol. 268: 10324-10334 and Sebastian-Martin et al., “Transcriptional inaccuracy threshold attenuates differences in RNA-dependent DNA synthesis fidelity between retroviral reverse transcriptases,” Scientific Reports, 2018, Vol. 8: 627, each of which are incorporated by reference. Still further, reverse transcriptases, including error-prone reverse transcriptases can be obtained from a commercial supplier, including ProtoScript® (II) Reverse Transcriptase, AMV Reverse Transcriptase, WarmStart® Reverse Transcriptase, and M-MuLV Reverse Transcriptase, all from NEW ENGLAND BIOLABS®, or AMV Reverse Transcriptase XL, SMARTScribe Reverse Transcriptase, GPR ultra-pure MMLV Reverse Transcriptase, all from TAKARA BIO USA, INC. (formerly CLONTECH).

[0463] The herein disclosure also contemplates reverse transcriptases having mutations in RNaseH domain. As mentioned above, one of the intrinsic properties of reverse transcriptases is the RNase H activity, which cleaves the RNA template of the RNA:cDNA hybrid concurrently with polymerization. The RNase H activity can be undesirable for synthesis of long cDNAs because the RNA template may be degraded before completion of full-length reverse transcription. The RNase H activity may also lower reverse transcription efficiency, presumably due to its competition with the polymerase activity of the enzyme. Thus, the present disclosure contemplates any reverse transcriptase variants that comprise a modified RNaseH activity.

[0464] The herein disclosure also contemplates reverse transcriptases having mutations in the RNA-dependent DNA polymerase domain. As mentioned above, one of the intrinsic properties of reverse transcriptases is the RNA-dependent DNA polymerase activity, which incorporates the nucleobases into the nascent cDNA strand as coded by the template RNA strand of the RNA:cDNA hybrid. The RNA-dependent DNA polymerase activity can be increased or decreased (i.e., in terms of its rate of incorporation) to either increase or decrease the processivity of the enzyme. Thus, the present disclosure contemplates any reverse transcriptase variants that comprise a modified RNA-dependent DNA polymerase activity such that the processivity of the enzyme of either increased or decreased relative to an unmodified version.

[0465] Also contemplated herein are reverse transcriptase variants that have altered thermostability characteristics. The ability of a reverse transcriptase to withstand high temperatures is an important aspect of cDNA synthesis. Elevated reaction temperatures help denature RNA with strong secondary structures and/or high GC content, allowing reverse transcriptases to read through the sequence. As a result, reverse transcription at higher temperatures enables full-length cDNA synthesis and higher yields, which can lead to an improved generation of the 3′ flap ssDNA as a result of the prime editing process. Wild type M-MLV reverse transcriptase typically has an optimal temperature in the range of 37-48° C.; however, mutations may be introduced that allow for the reverse transcription activity at higher temperatures of over 48° C., including 49° C., 50° C., 51° C., 52° C., 53° C., 54° C., 55° C., 56° C., 57° C., 58° C., 59° C., 60° C., 61° C., 62° C., 63° C., 64° C., 65° C., 66° C., and higher.

[0466] The variant reverse transcriptases contemplated herein, including error-prone RTs, thermostable RTs, increase-processivity RTs, can be engineered by various routine strategies, including mutagenesis or evolutionary processes. In some cases, the variants can be produced by introducing a single mutation. In other cases, the variants may require more than one mutation. For those mutants comprising more than one mutation, the effect of a given mutation may be evaluated by introduction of the identified mutation to the wild-type gene by site-directed mutagenesis in isolation from the other mutations borne by the particular mutant. Screening assays of the single mutant thus produced will then allow the determination of the effect of that mutation alone.

[0467] Variant RT enzymes used herein may also include other “RT variants” having at least about 70% identical, at least about 80% identical, at least about 90% identical, at least about 95% identical, at least about 96% identical, at least about 97% identical, at least about 98% identical, at least about 99% identical, at least about 99.5% identical, or at least about 99.9% identical to any reference RT protein, including any wild type RT, or mutant RT, or fragment RT, or other variant of RT disclosed or contemplated herein or known in the art.

[0468] In some embodiments, an RT variant may have 1, 2, 3, 4, 5, 6, 7, 8, 9, 10, 11, 12, 13, 14, 15, 16, 17, 18, 19, 20, 21, 22, 21, 24, 25, 26, 27, 28, 29, 30, 31, 32, 33, 34, 35, 36, 37, 38, 39, 40, 41, 42, 43, 44, 45, 46, 47, 48, 49, 50, or up to 100, or up to 200, or up to 300, or up to 400, or up to 500 or more amino acid changes compared to a reference RT. In some embodiments, the RT variant comprises a fragment of a reference RT, such that the fragment is at least about 70% identical, at least about 80% identical, at least about 90% identical, at least about 95% identical, at least about 96% identical, at least about 97% identical, at least about 98% identical, at least about 99% identical, at least about 99.5% identical, or at least about 99.9% identical to the corresponding fragment of the reference RT. In some embodiments, the fragment is at least 30%, at least 35%, at least 40%, at least 45%, at least 50%, at least 55%, at least 60%, at least 65%, at least 70%, at least 75%, at least 80%, at least 85%, at least 90%, at least 95% identical, at least 96%, at least 97%, at least 98%, at least 99%, or at least 99.5% of the amino acid length of a corresponding wild type RT (M-MLV reverse transcriptase) (e.g., SEQ ID NO: 89) or to any of the reverse transcriptases of SEQ ID NOs: 90-100.

[0469] In some embodiments, the disclosure also may utilize RT fragments which retain their functionality and which are fragments of any herein disclosed RT proteins. In some embodiments, the RT fragment is at least 100 amino acids in length. In some embodiments, the fragment is at least 100, 150, 200, 250, 300, 350, 400, 450, 500, 550, or up to 600 or more amino acids in length.

[0470] In still other embodiments, the disclosure also may utilize RT variants which are truncated at the N-terminus or the C-terminus, or both, by a certain number of amino acids which results in a truncated variant which still retains sufficient polymerase function. In some embodiments, the RT truncated variant has a truncation of at least 1, at least 2, at least 3, at least 4, at least 5, at least 6, at least 7, at least 8, at least 9, at least 10, at least 11, at least 12, at least 13, at least 14, at least 15, at least 16, at least 17, at least 18, at least 19, at least 20, at least 21, at least 22, at least 23, at least 24, at least 25, at least 30, 40, 50, 60, 70, 80, 90, 100, 110, 120, 130, 140, 150, 160, 170, 180, 190, 200, 210, 220, 230, 240, or 250 amino acids at the N-terminal end of the protein. In other embodiments, the RT truncated variant has a truncation of at least 1, at least 2, at least 3, at least 4, at least 5, at least 6, at least 7, at least 8, at least 9, at least 10, at least 11, at least 12, at least 13, at least 14, at least 15, at least 16, at least 17, at least 18, at least 19, at least 20, at least 21, at least 22, at least 23, at least 24, at least 25, at least 30, 40, 50, 60, 70, 80, 90, 100, 110, 120, 130, 140, 150, 160, 170, 180, 190, 200, 210, 220, 230, 240, or 250 amino acids at the C-terminal end of the protein. In still other embodiments, the RT truncated variant has a trunction at the N-terminal and the C-terminal end which are the same or different lengths.

[0471] For example, the prime editors disclosed herein may include a truncated version of M-MLV reverse transcriptase. In this embodiment, the reverse transcriptase contains 4 mutations (D200N, T306K, W313F, T330P; noting that the L603W mutation present in PE2 is no longer present due to the truncation). The DNA sequence encoding this truncated editor is 522 bp smaller than PE2, and therefore makes its potentially useful for applications where delivery of the DNA sequence is challenging due to its size (i.e., adeno-associated virus and lentivirus delivery). This embodiment is referred to as MMLV-RT(trunc) and has the following amino acid sequence:

| | |
|---|---|
| MMLV- | TLNIEDEYRLHETSKEPDVSLGSTWLSDFPQAWAETGGMGLAVRQ |
| RT(TRUNC) | APLIIPLKATSTPVSIKQYPMSQEARLGIKPHIQRLLDQGILVPCQSP |
| | WNTPLLPVKKPGTNDYRPVQDLREVNKRVEDIHPTVPNPYNLLSGL |
| | PPSHQWYTVLDLKDAFFCLRLHPTSQPLFAFEWRDPEMGISGQLT |
| | WTRLPQGFKNSPTLFNEALHRDLADFRIQHPDLILLQYVDDLLLAA |
| | TSELDCQQGTRALLQTLGNLGYRASAKKAQICQKQVKYLGYLLKEG |
| | QRWLTEARKETVMGQPTPKTPRQLREFLGKAGFCRLFIPGFAEMA |
| | APLYPLTKPGTLFNWGPDQQKAYQEIKQALLTAPALGLPDLTKPFE |
| | LFVDEKQGYAKGVLTQKLGPWRRPVAYLSKKLDPVAAGWPPCLR |
| | MVAAIAVLTKDAGKLTMGQPLVILAPHAVEALVKQPPDRWLSNAR |
| | MTHYQALLLDTDRVQFGPVVALNPATLLPLPEEGLQHNCLDNSRLI |
| | N (SEQ ID NO: 766) |

[0472] In various embodiments, the prime editors disclosed herein may comprise one of the RT variants described herein, or a RT variant thereof having at least about 70% identical, at least about 80% identical, at least about 90% identical, at least about 95% identical, at least about 96% identical, at least about 97% identical, at least about 98% identical, at least about 99% identical, at least about 99.5% identical, or at least about 99.9% identical to any reference Cas9 variants.

[0473] In still other embodiments, the present methods and compositions may utilize a DNA polymerase that has been evolved into a reverse transcriptase, as described in Effefson et al., “Synthetic evolutionary origin of a proofreading reverse transcriptase,” Science, Jun. 24, 2016, Vol. 352: 1590-1593, the contents of which are incorporated herein by reference.

[0474] In certain other embodiments, the reverse transcriptase is provided as a component of a fusion protein also comprising a napDNAbp. In other words, in some embodiments, the reverse transcriptase is fused to a napDNAbp as a fusion protein.

[0475] In various embodiments, variant reverse transcriptases can be engineered from wild type M-MLV reverse transcriptase as represented by SEQ ID NO: 89.

[0476] In various embodiments, the prime editors described herein (with RT provided as either a fusion partner or in trans) can include a variant RT comprising one or more of the following mutations: P51L, S67K, E69K, L139P, T197A, D200N, H204R, F209N, E302K, E302R, T306K, F309N, W313F, T330P, L345G, L435G, N454K, D524G, E562Q, D583N, H594Q, L603W, E607K, or D653N in the wild type M-MLV RT of SEQ ID NO: 89 or at a corresponding amino acid position in another wild type RT polypeptide sequence.

[0477] Some exemplary reverse transcriptases that can be fused to napDNAbp proteins or provided as individual proteins according to various embodiments of this disclosure are provided below. Exemplary reverse transcriptases include variants with at least 80%, at least 85%, at least 90%, at least 95%, or at least 99% sequence identity to the following wild-type enzymes or partial enzymes:

| Description | Sequence (variant substitutions relative to wild type) |
|---|---|
| Reverse | TLNIEDEYRLHETSKEPDVSLGSTWLSDFPQAWAETGGMGLAVRQAP |
| transcriptase | LIIPLKATSTPVSIKQYPMSQEARLGIKPHIQRLLDQGILVPCQSPWNTPL |
| (M-MLV RT) | LPVKKPGTNDYRPVQDLREVNKRVEDIHPTVPNPYNLLSGLPPSHQWY |
| wild type | TVLDLKDAFFCLRLHPTSQPLFAFEWRDPEMGISGQLTWTRLPQGFKN |
| moloney | SPTLFDEALHRDLADFRIQHPDLILLQYVDDLLLAATSELDCQQGTRAL |
| murine | LQTLGNLGYRASAKKAQICQKQVKYLGYLLKEGQRWLTEARKETVM |
| leukemia | GQPTPKTPRQLREFLGTAGFCRLWIPGFAEMAAPLYPLTKTGTLFNWG |
| virus | PDQQKAYQEIKQALLTAPALGLPDLTKPFELFVDEKQGYAKGVLTQKL |
| Used in PE1 | GPWRRPVAYLSKKLDPVAAGWPPCLRMVAAIAVLTKDAGKLTMGQP |
| (prime editor | LVILAPHAVEALVKQPPDRWLSNARMTHYQALLLDTDRVQFGPVVAL |
| 1 fusion | NPATLLPLPEEGLQHNCLDILAEAHGTRPDLTDQPLPDADHTWYTDGS |
| protein | SLLQEGQRKAGAAVTTETEVIWAKALPAGTSAQRAELIALTQALKMA |
| disclosed | EGKKLNVYTDSRYAFATAHIHGEIYRRRGLLTSEGKEIKNKDEILALLK |
| herein) | ALFLPKRLSIIHCPGHQKGHSAEARGNRMADQAARKAAITETPDTSTLL |
| | IENSSP (SEQ ID NO: 700) |
| M-MLV RT | TLNIEDEYRLHETS KEPDVSLGSTWLSDFPQAWAETGGMGLAVRQAP |
| D200N | LIIPLKATSTPVSIKQYPMSQEARLGIKPHIQRLLDQGILVPCQSPWNTPL |
| | LPVKKPGTNDYRPVQDLREVNKRVEDIHPTVPNPYNLLSGLPPSHQWY |
| | TVLDLKDAFFCLRLHPTSQPLFAFEWRDPEMGISGQLTWTRLPQGFKN |
| | SPTLFNEALHRDLADFRIQHPDLILLQYVDDLLLAATSELDCQQGTRAL |
| | LQTLGNLGYRASAKKAQICQKQVKYLGYLLKEGQRWLTEARKETVM |
| | GQPTPKTPRQLREFLGTAGFCRLWIPGFAEMAAPLYPLTKTGTLFNWG |
| | PDQQKAYQEIKQALLTAPALGLPDLTKPFELFVDEKQGYAKGVLTQKL |
| | GPWRRPVAYLSKKLDPVAAGWPPCLRMVAAIAVLTKDAGKLTMGQP |
| | LVILAPHAVEALVKQPPDRWLSNARMTHYQALLLDTDRVQFGPVVAL |
| | NPATLLPLPEEGLQHNCLDILAEAHGTRPDLTDQPLPDADHTWYTDGS |
| | SLLQEGQRKAGAAVTTETEVIWAKALPAGTSAQRAELIALTQALKMA |
| | EGKKLNVYTDSRYAFATAHIHGEIYRRRGLLTSEGKEIKNKDEILALLK |
| | ALFLPKRLSIIHCPGHQKGHSAEARGNRMADQAARKAAITETPDTSTLL |
| | IENSSP (SEQ ID NO: 701) |
| M-MLV RT | TLNIEDEYRLHETSKEPDVSLGSTWLSDFPQAWAETGGMGLAVRQAP |
| D200N | LIIPLKATSTPVSIKQYPMSQEARLGIKPHIQRLLDQGILVPCQSPWNTPL |
| T330P | LPVKKPGTNDYRPVQDLREVNKRVEDIHPTVPNPYNLLSGLPPSHQWY |
| | TVLDLKDAFFCLRLHPTSQPLFAFEWRDPEMGISGQLTWTRLPQGFKN |
| | SPTLFNEALHRDLADFRIQHPDLILLQYVDDLLLAATSELDCQQGTRAL |
| | LQTLGNLGYRASAKKAQICQKQVKYLGYLLKEGQRWLTEARKETVM |
| | GQPTPKTPRQLREFLGTAGFCRLWIPGFAEMAAPLYPLTKPGTLFNWG |
| | PDQQKAYQEIKQALLTAPALGLPDLTKPFELFVDEKQGYAKGVLTQKL |
| | GPWRRPVAYLSKKLDPVAAGWPPCLRMVAAIAVLTKDAGKLTMGQP |
| | LVILAPHAVEALVKQPPDRWLSNARMTHYQALLLDTDRVQFGPVVAL |
| | NPATLLPLPEEGLQHNCLDILAEAHGTRPDLTDQPLPDADHTWYTDGS |
| | SLLQEGQRKAGAAVTTETEVIWAKALPAGTSAQRAELIALTQALKMA |
| | EGKKLNVYTDSRYAFATAHIHGEIYRRRGLLTSEGKEIKNKDEILALLK |
| | ALFLPKRLSIIHCPGHQKGHSAEARGNRMADQAARKAAITETPDTSTLL |
| | IENSSP (SEQ ID NO: 702) |
| M-MLV RT | TLNIEDEYRLHETSKEPDVSLGSTWLSDFPQAWAETGGMGLAVRQAP |
| D200N | LIIPLKATSTPVSIKQYPMSQEARLGIKPHIQRLLDQGILVPCQSPWNTPL |
| T330P | LPVKKPGTNDYRPVQDLREVNKRVEDIHPTVPNPYNLLSGLPPSHQWY |
| L603W | TVLDLKDAFFCLRLHPTSQPLFAFEWRDPEMGISGQLTWTRLPQGFKN |
| | SPTLFNEALHRDLADFRIQHPDLILLQYVDDLLLAATSELDCQQGTRAL |
| | LQTLGNLGYRASAKKAQICQKQVKYLGYLLKEGQRWLTEARKETVM |
| | GQPTPKTPRQLREFLGTAGFCRLWIPGFAEMAAPLYPLTKPGTLFNWG |
| | PDQQKAYQEIKQALLTAPALGLPDLTKPFELFVDEKQGYAKGVLTQKL |
| | GPWRRPVAYLSKKLDPVAAGWPPCLRMVAAIAVLTKDAGKLTMGQP |
| | LVILAPHAVEALVKQPPDRWLSNARMTHYQALLLDTDRVQFGPVVAL |
| | NPATLLPLPEEGLQHNCLDILAEAHGTRPDLTDQPLPDADHTWYTDGS |
| | SLLQEGQRKAGAAVTTETEVIWAKALPAGTSAQRAELIALTQALKMA |
| | EGKKLNVYTDSRYAFATAHIHGEIYRRRGWLTSEGKEIKNKDEILALL |
| | KALFLPKRLSIIHCPGHQKGHSAEARGNRMADQAARKAAITETPDTST |
| | LLIENSSP (SEQ ID NO: 740) |
| M-MLV RT | TLNIEDEYRLHETSKEPDVSLGSTWLSDFPQAWAETGGMGLAVRQAP |
| D200N | LIIPLKATSTPVSIKQYPMSQKARLGIKPHIQRLLDQGILVPCQSPWNTP |
| T330P | LLPVKKPGTNDYRPVQDLREVNKRVEDIHPTVPNPYNLLSGLPPSHQW |
| L603W | YTVLDLKDAFFCLRLHPTSQPLFAFEWRDPEMGISGQLTWTRLPQGFK |
| E69K | NSPTLFNEALHRDLADFRIQHPDLILLQYVDDLLLAATSELDCQQGTRA |
| | LLQTLGNLGYRASAKKAQICQKQVKYLGYLLKEGQRWLTEARKETV |
| | MGQPTPKTPRQLREFLGTAGFCRLWIPGFAEMAAPLYPLTKPGTLFNW |
| | GPDQQKAYQEIKQALLTAPALGLPDLTKPFELFVDEKQGYAKGVLTQ |
| | KLGPWRRPVAYLSKKLDPVAAGWPPCLRMVAAIAVLTKDAGKLTMG |
| | QPLVILAPHAVEALVKQPPDRWLSNARMTHYQALLLDTDRVQFGPVV |
| | ALNPATLLPLPEEGLQHNCLDILAEAHGTRPDLTDQPLPDADHTWYTD |
| | GSSLLQEGQRKAGAAVTTETEVIWAKALPAGTSAQRAELIALTQALK |
| | MAEGKKLNVYTDSRYAFATAHIHGEIYRRRGWLTSEGKEIKNKDEILA |
| | LLKALFLPKRLSIIHCPGHQKGHSAEARGNRMADQAARKAAITETPDT |
| | STLLIENSSP (SEQ ID NO: 703) |
| M-MLV RT | TLNIEDEYRLHETSKEPDVSLGSTWLSDFPQAWAETGGMGLAVRQAP |
| D200N | LIIPLKATSTPVSIKQYPMSQEARLGIKPHIQRLLDQGILVPCQSPWNTPL |
| T330P | LPVKKPGTNDYRPVQDLREVNKRVEDIHPTVPNPYNLLSGLPPSHQWY |
| L603W | TVLDLKDAFFCLRLHPTSQPLFAFEWRDPEMGISGQLTWTRLPQGFKN |
| E302R | SPTLFNEALHRDLADFRIQHPDLILLQYVDDLLLAATSELDCQQGTRAL |
| | LQTLGNLGYRASAKKAQICQKQVKYLGYLLKEGQRWLTEARKETVM |
| | GQPTPKTPRQLRRFLGTAGFCRLWIPGFAEMAAPLYPLTKPGTLFNWG |
| | PDQQKAYQEIKQALLTAPALGLPDLTKPFELFVDEKQGYAKGVLTQKL |
| | GPWRRPVAYLSKKLDPVAAGWPPCLRMVAAIAVLTKDAGKLTMGQP |
| | LVILAPHAVEALVKQPPDRWLSNARMTHYQALLLDTDRVQFGPVVAL |
| | NPATLLPLPEEGLQHNCLDILAEAHGTRPDLTDQPLPDADHTWYTDGS |
| | SLLQEGQRKAGAAVTTETEVIWAKALPAGTSAQRAELIALTQALKMA |
| | EGKKLNVYTDSRYAFATAHIHGEIYRRRGWLTSEGKEIKNKDEILALL |
| | KALFLPKRLSIIHCPGHQKGHSAEARGNRMADQAARKAAITETPDTST |
| | LLIENS SP(SEQ ID NO: 704) |
| M-MLV RT | TLNIEDEYRLHETSKEPDVSLGSTWLSDFPQAWAETGGMGLAVRQAP |
| D200N | LIIPLKATSTPVSIKQYPMSQEARLGIKPHIQRLLDQGILVPCQSPWNTPL |
| T330P | LPVKKPGTNDYRPVQDLREVNKRVEDIHPTVPNPYNLLSGLPPSHQWY |
| L603W | TVLDLKDAFFCLRLHPTSQPLFAFEWRDPEMGISGQLTWTRLPQGFKN |
| E607K | SPTLFNEALHRDLADFRIQHPDLILLQYVDDLLLAATSELDCQQGTRAL |
| | LQTLGNLGYRASAKKAQICQKQVKYLGYLLKEGQRWLTEARKETVM |
| | GQPTPKTPRQLREFLGTAGFCRLWIPGFAEMAAPLYPLTKPGTLFNWG |
| | PDQQKAYQEIKQALLTAPALGLPDLTKPFELFVDEKQGYAKGVLTQKL |
| | GPWRRPVAYLSKKLDPVAAGWPPCLRMVAAIAVLTKDAGKLTMGQP |
| | LVILAPHAVEALVKQPPDRWLSNARMTHYQALLLDTDRVQFGPVVAL |
| | NPATLLPLPEEGLQHNCLDILAEAHGTRPDLTDQPLPDADHTWYTDGS |
| | SLLQEGQRKAGAAVTTETEVIWAKALPAGTSAQRAELIALTQALKMA |
| | EGKKLNVYTDSRYAFATAHIHGEIYRRRGWLTSKGKEIKNKDEILALL |
| | KALFLPKRLSIIHCPGHQKGHSAEARGNRMADQAARKAAITETPDTST |
| | LLIENSSP (SEQ ID NO: 705) |
| M-MLV RT | TLNIEDEYRLHETSKEPDVSLGSTWLSDFPQAWAETGGMGLAVRQAP |
| D200N | LIIPLKATSTPVSIKQYPMSQEARLGIKPHIQRLLDQGILVPCQSPWNTPL |
| T330P | LPVKKPGTNDYRPVQDLREVNKRVEDIHPTVPNPYNLLSGPPPSHQWY |
| L603W | TVLDLKDAFFCLRLHPTSQPLFAFEWRDPEMGISGQLTWTRLPQGFKN |
| L139P | SPTLFNEALHRDLADFRIQHPDLILLQYVDDLLLAATSELDCQQGTRAL |
| | LQTLGNLGYRASAKKAQICQKQVKYLGYLLKEGQRWLTEARKETVM |
| | GQPTPKTPRQLREFLGTAGFCRLWIPGFAEMAAPLYPLTKPGTLFNWG |
| | PDQQKAYQEIKQALLTAPALGLPDLTKPFELFVDEKQGYAKGVLTQKL |
| | GPWRRPVAYLSKKLDPVAAGWPPCLRMVAAIAVLTKDAGKLTMGQP |
| | LVILAPHAVEALVKQPPDRWLSNARMTHYQALLLDTDRVQFGPVVAL |
| | NPATLLPLPEEGLQHNCLDILAEAHGTRPDLTDQPLPDADHTWYTDGS |
| | SLLQEGQRKAGAAVTTETEVIWAKALPAGTSAQRAELIALTQALKMA |
| | EGKKLNVYTDSRYAFATAHIHGEIYRRRGWLTSEGKEIKNKDEILALL |
| | KALFLPKRLSIIHCPGHQKGHSAEARGNRMADQAARKAAITETPDTST |
| | LLIENSSP (SEQ ID NO: 706) |
| M-MLV RT | TLNIEDEYRLHETS KEPDVSLGS TWLSDFPQAWAETGGMGLAVRQAP |
| D200N | LIIPLKATSTPVSIKQYPMSQEARLGIKPHIQRLLDQGILVPCQSPWNTPL |
| T330P | LPVKKPGTNDYRPVQDLREVNKRVEDIHPTVPNPYNLLSGLPPSHQWY |
| L603W | TVLDLKDAFFCLRLHPTSQPLFAFEWRDPEMGISGQLTWTRLPQGFKN |
| L435G | SPTLFNEALHRDLADFRIQHPDLILLQYVDDLLLAATSELDCQQGTRAL |
| | LQTLGNLGYRASAKKAQICQKQVKYLGYLLKEGQRWLTEARKETVM |
| | GQPTPKTPRQLREFLGTAGFCRLWIPGFAEMAAPLYPLTKPGTLFNWG |
| | PDQQKAYQEIKQALLTAPALGLPDLTKPFELFVDEKQGYAKGVLTQKL |
| | GPWRRPVAYLSKKLDPVAAGWPPCLRMVAAIAVLTKDAGKLTMGQP |
| | LVIGAPHAVEALVKQPPDRWLSNARMTHYQALLLDTDRVQFGPVVAL |
| | NPATLLPLPEEGLQHNCLDILAEAHGTRPDLTDQPLPDADHTWYTDGS |
| | SLLQEGQRKAGAAVTTETEVIWAKALPAGTSAQRAELIALTQALKMA |
| | EGKKLNVYTDSRYAFATAHIHGEIYRRRGWLTSEGKEIKNKDEILALL |
| | KALFLPKRLSIIHCPGHQKGHSAEARGNRMADQAARKAAITETPDTST |
| | LLIENSSP (SEQ ID NO: 707) |
| M-MLV RT | TLNIEDEYRLHETSKEPDVSLGSTWLSDFPQAWAETGGMGLAVRQAP |
| D200N | LIIPLKATSTPVSIKQYPMSQEARLGIKPHIQRLLDQGILVPCQSPWNTPL |
| T330P | LPVKKPGTNDYRPVQDLREVNKRVEDIHPTVPNPYNLLSGLPPSHQWY |
| L603W | TVLDLKDAFFCLRLHPTSQPLFAFEWRDPEMGISGQLTWTRLPQGFKN |
| N454K | SPTLFNEALHRDLADFRIQHPDLILLQYVDDLLLAATSELDCQQGTRAL |
| | LQTLGNLGYRASAKKAQICQKQVKYLGYLLKEGQRWLTEARKETVM |
| | GQPTPKTPRQLREFLGTAGFCRLWIPGFAEMAAPLYPLTKPGTLFNWG |
| | PDQQKAYQEIKQALLTAPALGLPDLTKPFELFVDEKQGYAKGVLTQKL |
| | GPWRRPVAYLSKKLDPVAAGWPPCLRMVAAIAVLTKDAGKLTMGQP |
| | LVILAPHAVEALVKQPPDRWLSKARMTHYQALLLDTDRVQFGPVVAL |
| | NPATLLPLPEEGLQHNCLDILAEAHGTRPDLTDQPLPDADHTWYTDGS |
| | SLLQEGQRKAGAAVTTETEVIWAKALPAGTSAQRAELIALTQALKMA |
| | EGKKLNVYTDSRYAFATAHIHGEIYRRRGWLTSEGKEIKNKDEILALL |
| | KALFLPKRLSIIHCPGHQKGHSAEARGNRMADQAARKAAITETPDTST |
| | LLIENSSP (SEQ ID NO: 708) |
| M-MLV RT | TLNIEDEYRLHETSKEPDVSLGSTWLSDFPQAWAETGGMGLAVRQAP |
| D200N | LIIPLKATSTPVSIKQYPMSQEARLGIKPHIQRLLDQGILVPCQSPWNTPL |
| T330P | LPVKKPGTNDYRPVQDLREVNKRVEDIHPTVPNPYNLLSGLPPSHQWY |
| L603W | TVLDLKDAFFCLRLHPTSQPLFAFEWRDPEMGISGQLTWTRLPQGFKN |
| T306K | SPTLFNEALHRDLADFRIQHPDLILLQYVDDLLLAATSELDCQQGTRAL |
| | LQTLGNLGYRASAKKAQICQKQVKYLGYLLKEGQRWLTEARKETVM |
| | GQPTPKTPRQLREFLGKAGFCRLWIPGFAEMAAPLYPLTKPGTLFNWG |
| | PDQQKAYQEIKQALLTAPALGLPDLTKPFELFVDEKQGYAKGVLTQKL |
| | GPWRRPVAYLSKKLDPVAAGWPPCLRMVAAIAVLTKDAGKLTMGQP |
| | LVILAPHAVEALVKQPPDRWLSNARMTHYQALLLDTDRVQFGPVVAL |
| | NPATLLPLPEEGLQHNCLDILAEAHGTRPDLTDQPLPDADHTWYTDGS |
| | SLLQEGQRKAGAAVTTETEVIWAKALPAGTSAQRAELIALTQALKMA |
| | EGKKLNVYTDSRYAFATAHIHGEIYRRRGWLTSEGKEIKNKDEILALL |
| | KALFLPKRLSIIHCPGHQKGHSAEARGNRMADQAARKAAITETPDTST |
| | LLIENSSP (SEQ ID NO: 709) |
| M-MLV RT | TLNIEDEYRLHETSKEPDVSLGSTWLSDFPQAWAETGGMGLAVRQAP |
| D200N | LIIPLKATSTPVSIKQYPMSQEARLGIKPHIQRLLDQGILVPCQSPWNTPL |
| T330P | LPVKKPGTNDYRPVQDLREVNKRVEDIHPTVPNPYNLLSGLPPSHQWY |
| L603W | TVLDLKDAFFCLRLHPTSQPLFAFEWRDPEMGISGQLTWTRLPQGFKN |
| W313F | SPTLFNEALHRDLADFRIQHPDLILLQYVDDLLLAATSELDCQQGTRAL |
| | LQTLGNLGYRASAKKAQICQKQVKYLGYLLKEGQRWLTEARKETVM |
| | GQPTPKTPRQLREFLGTAGFCRLFIPGFAEMAAPLYPLTKPGTLFNWGP |
| | DQQKAYQEIKQALLTAPALGLPDLTKPFELFVDEKQGYAKGVLTQKL |
| | GPWRRPVAYLSKKLDPVAAGWPPCLRMVAAIAVLTKDAGKLTMGQP |
| | LVILAPHAVEALVKQPPDRWLSNARMTHYQALLLDTDRVQFGPVVAL |
| | NPATLLPLPEEGLQHNCLDILAEAHGTRPDLTDQPLPDADHTWYTDGS |
| | SLLQEGQRKAGAAVTTETEVIWAKALPAGTSAQRAELIALTQALKMA |
| | EGKKLNVYTDSRYAFATAHIHGEIYRRRGWLTSEGKEIKNKDEILALL |
| | KALFLPKRLSIIHCPGHQKGHSAEARGNRMADQAARKAAITETPDTST |
| | LLIENSSP (SEQ ID NO: 710) |
| M-MLV RT | TLNIEDEYRLHETSKEPDVSLGSTWLSDFPQAWAETGGMGLAVRQAP |
| D200N | LIIPLKATSTPVSIKQYPMSQEARLGIKPHIQRLLDQGILVPCQSPWNTPL |
| T330P | LPVKKPGTNDYRPVQDLREVNKRVEDIHPTVPNPYNLLSGLPPSHQWY |
| L603W | TVLDLKDAFFCLRLHPTSQPLFAFEWRDPEMGISGQLTWTRLPQGFKN |
| D524G | SPTLFNEALHRDLADFRIQHPDLILLQYVDDLLLAATSELDCQQGTRAL |
| E562Q | LQTLGNLGYRASAKKAQICQKQVKYLGYLLKEGQRWLTEARKETVM |
| D583N | GQPTPKTPRQLREFLGTAGFCRLWIPGFAEMAAPLYPLTKPGTLFNWG |
| | PDQQKAYQEIKQALLTAPALGLPDLTKPFELFVDEKQGYAKGVLTQKL |
| | GPWRRPVAYLSKKLDPVAAGWPPCLRMVAAIAVLTKDAGKLTMGQP |
| | LVILAPHAVEALVKQPPDRWLSNARMTHYQALLLDTDRVQFGPVVAL |
| | NPATLLPLPEEGLQHNCLDILAEAHGTRPDLTDQPLPDADHTWYTGGS |
| | SLLQEGQRKAGAAVTTETEVIWAKALPAGTSAQRAQLIALTQALKMA |
| | EGKKLNVYTNSRYAFATAHIHGEIYRRRGWLTSEGKEIKNKDEILALL |
| | KALFLPKRLSIIHCPGHQKGHSAEARGNRMADQAARKAAITETPDTST |
| | LLIENSSP (SEQ ID NO: 711) |
| M-MLV RT | TLNIEDEYRLHETSKEPDVSLGSTWLSDFPQAWAETGGMGLAVRQAP |
| D200N | LIIPLKATSTPVSIKQYPMSQEARLGIKPHIQRLLDQGILVPCQSPWNTPL |
| T330P | LPVKKPGTNDYRPVQDLREVNKRVEDIHPTVPNPYNLLSGLPPSHQWY |
| L603W | TVLDLKDAFFCLRLHPTSQPLFAFEWRDPEMGISGQLTWTRLPQGFKN |
| E302R | SPTLFNEALHRDLADFRIQHPDLILLQYVDDLLLAATSELDCQQGTRAL |
| W313F | LQTLGNLGYRASAKKAQICQKQVKYLGYLLKEGQRWLTEARKETVM |
| | GQPTPKTPRQLRRFLGTAGFCRLFIPGFAEMAAPLYPLTKPGTLFNWG |
| | PDQQKAYQEIKQALLTAPALGLPDLTKPFELFVDEKQGYAKGVLTQKL |
| | GPWRRPVAYLSKKLDPVAAGWPPCLRMVAAIAVLTKDAGKLTMGQP |
| | LVILAPHAVEALVKQPPDRWLSNARMTHYQALLLDTDRVQFGPVVAL |
| | NPATLLPLPEEGLQHNCLDILAEAHGTRPDLTDQPLPDADHTWYTDGS |
| | SLLQEGQRKAGAAVTTETEVIWAKALPAGTSAQRAELIALTQALKMA |
| | EGKKLNVYTDSRYAFATAHIHGEIYRRRGWLTSEGKEIKNKDEILALL |
| | KALFLPKRLSIIHCPGHQKGHSAEARGNRMADQAARKAAITETPDTST |
| | LLIENSSP (SEQ ID NO: 712) |
| M-MLV RT | TLNIEDEYRLHETSKEPDVSLGSTWLSDFPQAWAETGGMGLAVRQAP |
| D200N | LIIPLKATSTPVSIKQYPMSQEARLGIKPHIQRLLDQGILVPCQSPWNTPL |
| T330P | LPVKKPGTNDYRPVQDLREVNKRVEDIHPTVPNPYNLLSGPPPSHQWY |
| L603W | TVLDLKDAFFCLRLHPTSQPLFAFEWRDPEMGISGQLTWTRLPQGFKN |
| E607K | SPTLFNEALHRDLADFRIQHPDLILLQYVDDLLLAATSELDCQQGTRAL |
| L139P | LQTLGNLGYRASAKKAQICQKQVKYLGYLLKEGQRWLTEARKETVM |
| | GQPTPKTPRQLREFLGTAGFCRLWIPGFAEMAAPLYPLTKPGTLFNWG |
| | PDQQKAYQEIKQALLTAPALGLPDLTKPFELFVDEKQGYAKGVLTQKL |
| | GPWRRPVAYLSKKLDPVAAGWPPCLRMVAAIAVLTKDAGKLTMGQP |
| | LVILAPHAVEALVKQPPDRWLSNARMTHYQALLLDTDRVQFGPVVAL |
| | NPATLLPLPEEGLQHNCLDILAEAHGTRPDLTDQPLPDADHTWYTDGS |
| | SLLQEGQRKAGAAVTTETEVIWAKALPAGTSAQRAELIALTQALKMA |
| | EGKKLNVYTDSRYAFATAHIHGEIYRRRGWLTSKGKEIKNKDEILALL |
| | KALFLPKRLSIIHCPGHQKGHSAEARGNRMADQAARKAAITETPDTST |
| | LLIENSSP (SEQ ID NO: 713) |
| M-MLV RT | TLNIEDEYRLHETSKEPDVSLGSTWLSDFPQAWAETGGMGLAVRQAP |
| P51L S67K | LIILLKATSTPVSIKQYPMKQEARLGIKPHIQRLLDQGILVPCQSPWNTP |
| T197A | LLPVKKPGTNDYRPVQDLREVNKRVEDIHPTVPNPYNLLSGLPPSHQW |
| H204R | YTVLDLKDAFFCLRLHPTSQPLFAFEWRDPEMGISGQLTWTRLPQGFK |
| E302K | NSPALFDEALRRDLADFRIQHPDLILLQYVDDLLLAATSELDCQQGTR |
| F309N | ALLQTLGNLGYRASAKKAQICQKQVKYLGYLLKEGQRWLTEARKET |
| W313F | VMGQPTPKTPRQLRKFLGTAGNCRLFIPGFAEMAAPLYPLTKPGTLFN |
| T330P | WGPDQQKAYQEIKQALLTAPALGLPDLTKPFELFVDEKQGYAKGVLT |
| L435G | QKLGPWRRPVAYLSKKLDPVAAGWPPCLRMVAAIAVLTKDAGKLTM |
| N454K | GQPLVIGAPHAVEALVKQPPDRWLSKARMTHYQALLLDTDRVQFGPV |
| D524G | VALNPATLLPLPEEGLQHNCLDILAEAHGTRPDLTDQPLPDADHTWYT |
| D583N | GGSSLLQEGQRKAGAAVTTETEVIWAKALPAGTSAQRAELIALTQALK |
| H594Q | MAEGKKLNVYTNSRYAFATAHIQGEIYRRRGLLTSEGKEIKNKDEILA |
| D653N | LLKALFLPKRLSIIHCPGHQKGHSAEARGNRMANQAARKAAITETPDT |
| | STLLIENSSP (SEQ ID NO: 714) |
| M-MLV RT | TLNIEDEYRLHETSKEPDVSLGSTWLSDFPQAWAETGGMGLAVRQAP |
| D200N P51L | LIILLKATSTPVSIKQYPMKQEARLGIKPHIQRLLDQGILVPCQSWNTP |
| S67K T197A | LLPVKKPGTNDYRPVQDLREVNKRVEDIHPTVPNPYNLLSGLPPSHQW |
| H204R | YTVLDLKDAFFCLRLHPTSQPLFAFEWRDPEMGISGQLTWTRLPQGFK |
| E302K | NSPALFNEALRRDLADFRIQHPDLILLQYVDDLLLAATSELDCQQGTR |
| F309N | ALLQTLGNLGYRASAKKAQICQKQVKYLGYLLKEGQRWLTEARKET |
| W313F | VMGQPTPKTPRQLRKFLGTAGNCRLFIPGFAEMAAPLYPLTKPGTLFN |
| T330P L345G | WGPDQQKAYQEIKQALLTAPALGLPDLTKPFELFVDEKQGYAKGVLT |
| N454K | QKLGPWRRPVAYLSKKLDPVAAGWPPCLRMVAAIAVLTKDAGKLTM |
| D524G | GQPLVIGAPHAVEALVKQPPDRWLSKARMTHYQALLLDTDRVQFGPV |
| D583N | VALNPATLLPLPEEGLQHNCLDILAEAHGTRPDLTDQPLPDADHTWYT |
| H594Q | GGSSLLQEGQRKAGAAVTTETEVIWAKALPAGTSAQRAELIALTQALK |
| D653N | MAEGKKLNVYTNSRYAFATAHIQGEIYRRRGLLTSEGKEIKNKDEILA |
| | LLKALFLPKRLSIIHCPGHQKGHSAEARGNRMANQAARKAAITETPDT |
| | STLLIENSSP (SEQ ID NO: 715) |
| M-MLV RT | TLNIEDEYRLHETSKEPDVSLGSTWLSDFPQAWAETGGMGLAVRQAP |
| D200N | LIIPLKATSTPVSIKQYPMSQEARLGIKPHIQRLLDQGILVPCQSPWNTPL |
| T330P | LPVKKPGTNDYRPVQDLREVNKRVEDIHPTVPNPYNLLSGLPPSHQWY |
| L603W | TVLDLKDAFFCLRLHPTSQPLFAFEWRDPEMGISGQLTWTRLPQGFKN |
| T306K | SPTLFNEALHRDLADFRIQHPDLILLQYVDDLLLAATSELDCQQGTRAL |
| W313F | LQTLGNLGYRASAKKAQICQKQVKYLGYLLKEGQRWLTEARKETVM |
| in PE2 | GQPTPKTPRQLREFLGKAGFCRLFIPGFAEMAAPLYPLTKPGTLFNWG |
| | PDQQKAYQEIKQALLTAPALGLPDLTKPFELFVDEKQGYAKGVLTQKL |
| | GPWRRPVAYLSKKLDPVAAGWPPCLRMVAAIAVLTKDAGKLTMGQP |
| | LVILAPHAVEALVKQPPDRWLSNARMTHYQALLLDTDRVQFGPVVAL |
| | NPATLLPLPEEGLQHNCLDILAEAHGTRPDLTDQPLPDADHTWYTDGS |
| | SLLQEGQRKAGAAVTTETEVIWAKALPAGTSAQRAELIALTQALKMA |
| | EGKKLNVYTDSRYAFATAHIHGEIYRRRGWLTSEGKEIKNKDEILALL |
| | KALFLPKRLSIIHCPGHQKGHSAEARGNRMADQAARKAAITETPDTST |
| | LLIENSSP (SEQ ID NO: 716) |

[0478] In various other embodiments, the prime editors described herein (with RT provided as either a fusion partner or in trans) can include a variant RT comprising one or more of the following mutations: P51X, S67X, E69X, L139X, T197X, D200X, H204X, F209X, E302X, T306X, F309X, W313X, T330X, L345X, L435X, N454X, D524X, E562X, D583X, H594X, L603X, E607X, or D653X in the wild type M-MLV RT of SEQ ID NO: 89 or at a corresponding amino acid position in another wild type RT polypeptide sequence, wherein “X” can be any amino acid.

[0479] In various other embodiments, the prime editors described herein (with RT provided as either a fusion partner or in trans) can include a variant RT comprising a P51X mutation in the wild type M-MLV RT of SEQ ID NO: 89 or at a corresponding amino acid position in another wild type RT polypeptide sequence, wherein “X” can be any amino acid. In certain embodiments, X is L.

[0480] In various other embodiments, the prime editors described herein (with RT provided as either a fusion partner or in trans) can include a variant RT comprising a S67X mutation in the wild type M-MLV RT of SEQ ID NO: 89 or at a corresponding amino acid position in another wild type RT polypeptide sequence, wherein “X” can be any amino acid. In certain embodiments, X is K.

[0481] In various other embodiments, the prime editors described herein (with RT provided as either a fusion partner or in trans) can include a variant RT comprising a E69X mutation in the wild type M-MLV RT of SEQ ID NO: 89 or at a corresponding amino acid position in another wild type RT polypeptide sequence, wherein “X” can be any amino acid. In certain embodiments, X is K.

[0482] In various other embodiments, the prime editors described herein (with RT provided as either a fusion partner or in trans) can include a variant RT comprising a L139X mutation in the wild type M-MLV RT of SEQ ID NO: 89 or at a corresponding amino acid position in another wild type RT polypeptide sequence, wherein “X” can be any amino acid. In certain embodiments, X is P.

[0483] In various other embodiments, the prime editors described herein (with RT provided as either a fusion partner or in trans) can include a variant RT comprising a T197X mutation in the wild type M-MLV RT of SEQ ID NO: 89 or at a corresponding amino acid position in another wild type RT polypeptide sequence, wherein “X” can be any amino acid. In certain embodiments, X is A.

[0484] In various other embodiments, the prime editors described herein (with RT provided as either a fusion partner or in trans) can include a variant RT comprising a D200X mutation in the wild type M-MLV RT of SEQ ID NO: 89 or at a corresponding amino acid position in another wild type RT polypeptide sequence, wherein “X” can be any amino acid. In certain embodiments, X is N.

[0485] In various other embodiments, the prime editors described herein (with RT provided as either a fusion partner or in trans) can include a variant RT comprising a H204X mutation in the wild type M-MLV RT of SEQ ID NO: 89 or at a corresponding amino acid position in another wild type RT polypeptide sequence, wherein “X” can be any amino acid. In certain embodiments, X is R.

[0486] In various other embodiments, the prime editors described herein (with RT provided as either a fusion partner or in trans) can include a variant RT comprising a F209X mutation in the wild type M-MLV RT of SEQ ID NO: 89 or at a corresponding amino acid position in another wild type RT polypeptide sequence, wherein “X” can be any amino acid. In certain embodiments, X is N.

[0487] In various other embodiments, the prime editors described herein (with RT provided as either a fusion partner or in trans) can include a variant RT comprising a E302X mutation in the wild type M-MLV RT of SEQ ID NO: 89 or at a corresponding amino acid position in another wild type RT polypeptide sequence, wherein “X” can be any amino acid. In certain embodiments, X is K.

[0488] In various other embodiments, the prime editors described herein (with RT provided as either a fusion partner or in trans) can include a variant RT comprising a E302X mutation in the wild type M-MLV RT of SEQ ID NO: 89 or at a corresponding amino acid position in another wild type RT polypeptide sequence, wherein “X” can be any amino acid. In certain embodiments, X is R.

[0489] In various other embodiments, the prime editors described herein (with RT provided as either a fusion partner or in trans) can include a variant RT comprising a T306X mutation in the wild type M-MLV RT of SEQ ID NO: 89 or at a corresponding amino acid position in another wild type RT polypeptide sequence, wherein “X” can be any amino acid. In certain embodiments, X is K.

[0490] In various other embodiments, the prime editors described herein (with RT provided as either a fusion partner or in trans) can include a variant RT comprising a F309X mutation in the wild type M-MLV RT of SEQ ID NO: 89 or at a corresponding amino acid position in another wild type RT polypeptide sequence, wherein “X” can be any amino acid. In certain embodiments, X is N.

[0491] In various other embodiments, the prime editors described herein (with RT provided as either a fusion partner or in trans) can include a variant RT comprising a W313X mutation in the wild type M-MLV RT of SEQ ID NO: 89 or at a corresponding amino acid position in another wild type RT polypeptide sequence, wherein “X” can be any amino acid. In certain embodiments, X is F.

[0492] In various other embodiments, the prime editors described herein (with RT provided as either a fusion partner or in trans) can include a variant RT comprising a T330X mutation in the wild type M-MLV RT of SEQ ID NO: 89 or at a corresponding amino acid position in another wild type RT polypeptide sequence, wherein “X” can be any amino acid. In certain embodiments, X is P.

[0493] In various other embodiments, the prime editors described herein (with RT provided as either a fusion partner or in trans) can include a variant RT comprising a L345X mutation in the wild type M-MLV RT of SEQ ID NO: 89 or at a corresponding amino acid position in another wild type RT polypeptide sequence, wherein “X” can be any amino acid. In certain embodiments, X is G.

[0494] In various other embodiments, the prime editors described herein (with RT provided as either a fusion partner or in trans) can include a variant RT comprising a L435X mutation in the wild type M-MLV RT of SEQ ID NO: 89 or at a corresponding amino acid position in another wild type RT polypeptide sequence, wherein “X” can be any amino acid. In certain embodiments, X is G.

[0495] In various other embodiments, the prime editors described herein (with RT provided as either a fusion partner or in trans) can include a variant RT comprising a N454X mutation in the wild type M-MLV RT of SEQ ID NO: 89 or at a corresponding amino acid position in another wild type RT polypeptide sequence, wherein “X” can be any amino acid. In certain embodiments, X is K.

[0496] In various other embodiments, the prime editors described herein (with RT provided as either a fusion partner or in trans) can include a variant RT comprising a D524X mutation in the wild type M-MLV RT of SEQ ID NO: 89 or at a corresponding amino acid position in another wild type RT polypeptide sequence, wherein “X” can be any amino acid. In certain embodiments, X is G.

[0497] In various other embodiments, the prime editors described herein (with RT provided as either a fusion partner or in trans) can include a variant RT comprising a E562X mutation in the wild type M-MLV RT of SEQ ID NO: 89 or at a corresponding amino acid position in another wild type RT polypeptide sequence, wherein “X” can be any amino acid. In certain embodiments, X is Q.

[0498] In various other embodiments, the prime editors described herein (with RT provided as either a fusion partner or in trans) can include a variant RT comprising a D583X mutation in the wild type M-MLV RT of SEQ ID NO: 89 or at a corresponding amino acid position in another wild type RT polypeptide sequence, wherein “X” can be any amino acid. In certain embodiments, X is N.

[0499] In various other embodiments, the prime editors described herein (with RT provided as either a fusion partner or in trans) can include a variant RT comprising a H594X mutation in the wild type M-MLV RT of SEQ ID NO: 89 or at a corresponding amino acid position in another wild type RT polypeptide sequence, wherein “X” can be any amino acid. In certain embodiments, X is Q.

[0500] In various other embodiments, the prime editors described herein (with RT provided as either a fusion partner or in trans) can include a variant RT comprising a L603X mutation in the wild type M-MLV RT of SEQ ID NO: 89 or at a corresponding amino acid position in another wild type RT polypeptide sequence, wherein “X” can be any amino acid. In certain embodiments, X is W.

[0501] In various other embodiments, the prime editors described herein (with RT provided as either a fusion partner or in trans) can include a variant RT comprising a E607X mutation in the wild type M-MLV RT of SEQ ID NO: 89 or at a corresponding amino acid position in another wild type RT polypeptide sequence, wherein “X” can be any amino acid. In certain embodiments, X is K.

[0502] In various other embodiments, the prime editors described herein (with RT provided as either a fusion partner or in trans) can include a variant RT comprising a D653X mutation in the wild type M-MLV RT of SEQ ID NO: 89 or at a corresponding amino acid position in another wild type RT polypeptide sequence, wherein “X” can be any amino acid. In certain embodiments, X is N.

[0503] Some exemplary reverse transcriptases that can be fused to napDNAbp proteins or provided as individual proteins according to various embodiments of this disclosure are provided below. Exemplary reverse transcriptases include variants with at least 80%, at least 85%, at least 90%, at least 95% or at least 99% sequence identity to the following wild-type enzymes or partial enzymes:

| DESCRIPTION | SEQUENCE (VARIANT SUBSTITUTIONS RELATIVE TO WILD TYPE) |
|---|---|
| REVERSE | TLNIEDEYRLHETSKEPDVSLGSTWLSDFPQAWAETGGMGLAVRQAPL |
| TRANSCRIPTASE | IIPLKATSTPVSIKQYPMSQEARLGIKPHIQRLLDQGILVPCQSPWNTPLL |
| (M-MLV RT) | PVKKPGTNDYRPVQDLREVNKRVEDIHPTVPNPYNLLSGLPPSHQWYT |
| WILD TYPE | VLDLKDAFFCLRLHPTSQPLFAFEWRDPEMGISGQLTWTRLPQGFKNSP |
| MOLONEY | TLFDEALHRDLADFRIQHPDLILLQYVDDLLLAATSELDCQQGTRALLQ |
| MURINE | TLGNLGYRASAKKAQICQKQVKYLGYLLKEGQRWLTEARKETVMGQ |
| LEUKEMIA | PTPKTPRQLREFLGTAGFCRLWIPGFAEMAAPLYPLTKTGTLFNWGPDQ |
| VIRUS | QKAYQEIKQALLTAPALGLPDLTKPFELFVDEKQGYAKGVLTQKLGPW |
| USED IN | RRPVAYLSKKLDPVAAGWPPCLRMVAAIAVLTKDAGKLTMGQPLVILA |
| PE1 (PRIME | PHAVEALVKQPPDRWLSNARMTHYQALLLDTDRVQFGPVVALNPATLL |
| EDITOR 1 | PLPEEGLQHNCLDILAEAHGTRPDLTDQPLPDADHTWYTDGSSLLQEG |
| FUSION | QRKAGAAVTTETEVIWAKALPAGTSAQRAELIALTQALKMAEGKKLN |
| PROTEIN | VYTDSRYAFATAHIHGEIYRRRGLLTSEGKEIKNKDEILALLKALFLPKR |
| DISCLOSED | LSIIHCPGHQKGHSAEARGNRMADQAARKAAITETPDTSTLLIENSSP |
| HEREIN) | (SEQ ID NO: 89) |
| M-MLV RT | TLNIEDEYRLHETSKEPDVSLGSTWLSDFPQAWAETGGMGLAVRQAPL |
| D200N | IIPLKATSTPVSIKQYPMSQEARLGIKPHIQRLLDQGILVPCQSPWNTPLL |
| | PVKKPGTNDYRPVQDLREVNKRVEDIHPTVPNPYNLLSGLPPSHQWYT |
| | VLDLKDAFFCLRLHPTSQPLFAFEWRDPEMGISGQLTWTRLPQGFKNSP |
| | TLFNEALHRDLADFRIQHPDLILLQYVDDLLLAATSELDCQQGTRALLQ |
| | TLGNLGYRASAKKAQICQKQVKYLGYLLKEGQRWLTEARKETVMGQ |
| | PTPKTPRQLREFLGTAGFCRLWIPGFAEMAAPLYPLTKTGTLFNWGPDQ |
| | QKAYQEIKQALLTAPALGLPDLTKPFELFVDEKQGYAKGVLTQKLGPW |
| | RRPVAYLSKKLDPVAAGWPPCLRMVAAIAVLTKDAGKLTMGQPLVILA |
| | PHAVEALVKQPPDRWLSNARMTHYQALLLDTDRVQFGPVVALNPATLL |
| | PLPEEGLQHNCLDILAEAHGTRPDLTDQPLPDADHTWYTDGSSLLQEG |
| | QRKAGAAVTTETEVIWAKALPAGTSAQRAELIALTQALKMAEGKKLN |
| | VYTDSRYAFATAHIHGEIYRRRGLLTSEGKEIKNKDEILALLKALFLPKR |
| | LSIIHCPGHQKGHSAEARGNRMADQAARKAAITETPDTSTLLIENSSP |
| | (SEQ ID NO: 106) |
| M-MLV RT | TLNIEDEYRLHETSKEPDVSLGSTWLSDFPQAWAETGGMGLAVRQAPL |
| D200N | IIPLKATSTPVSIKQYPMSQEARLGIKPHIQRLLDQGILVPCQSPWNTPLL |
| T330P | PVKKPGTNDYRPVQDLREVNKRVEDIHPTVPNPYNLLSGLPPSHQWYT |
| | VLDLKDAFFCLRLHPTSQPLFAFEWRDPEMGISGQLTWTRLPQGFKNSP |
| | TLFNEALHRDLADFRIQHPDLILLQYVDDLLLAATSELDCQQGTRALLQ |
| | TLGNLGYRASAKKAQICQKQVKYLGYLLKEGQRWLTEARKETVMGQ |
| | PTPKTPRQLREFLGTAGFCRLWIPGFAEMAAPLYPLTKPGTLFNWGPDQ |
| | QKAYQEIKQALLTAPALGLPDLTKPFELFVDEKQGYAKGVLTQKLGPW |
| | RRPVAYLSKKLDPVAAGWPPCLRMVAAIAVLTKDAGKLTMGQPLVILA |
| | PHAVEALVKQPPDRWLSNARMTHYQALLLDTDRVQFGPVVALNPATLL |
| | PLPEEGLQHNCLDILAEAHGTRPDLTDQPLPDADHTWYTDGSSLLQEG |
| | QRKAGAAVTTETEVIWAKALPAGTSAQRAELIALTQALKMAEGKKLN |
| | VYTDSRYAFATAHIHGEIYRRRGLLTSEGKEIKNKDEILALLKALFLPKR |
| | LSIIHCPGHQKGHSAEARGNRMADQAARKAAITETPDTSTLLIENSSP |
| | (SEQ ID NO: 107) |
| M-MLV RT | TLNIEDEYRLHETSKEPDVSLGSTWLSDFPQAWAETGGMGLAVRQAPL |
| D200N | IIPLKATSTPVSIKQYPMSQEARLGIKPHIQRLLDQGILVPCQSPWNTPLL |
| T330P | PVKKPGTNDYRPVQDLREVNKRVEDIHPTVPNPYNLLSGLPPSHQWYT |
| L603W | VLDLKDAFFCLRLHPTSQPLFAFEWRDPEMGISGQLTWTRLPQGFKNSP |
| | TLFNEALHRDLADFRIQHPDLILLQYVDDLLLAATSELDCQQGTRALLQ |
| | TLGNLGYRASAKKAQICQKQVKYLGYLLKEGQRWLTEARKETVMGQ |
| | PTPKTPRQLREFLGTAGFCRLWIPGFAEMAAPLYPLTKPGTLFNWGPDQ |
| | QKAYQEIKQALLTAPALGLPDLTKPFELFVDEKQGYAKGVLTQKLGPW |
| | RRPVAYLSKKLDPVAAGWPPCLRMVAAIAVLTKDAGKLTMGQPLVILA |
| | PHAVEALVKQPPDRWLSNARMTHYQALLLDTDRVQFGPVVALNPATLL |
| | PLPEEGLQHNCLDILAEAHGTRPDLTDQPLPDADHTWYTDGSSLLQEG |
| | QRKAGAAVTTETEVIWAKALPAGTSAQRAELIALTQALKMAEGKKLN |
| | VYTDSRYAFATAHIHGEIYRRRGWLTSEGKEIKNKDEILALLKALFLPKR |
| | LSIIHCPGHQKGHSAEARGNRMADQAARKAAITETPDTSTLLIENSSP |
| | (SEQ ID NO: 108) |
| M-MLV RT | TLNIEDEYRLHETSKEPDVSLGSTWLSDFPQAWAETGGMGLAVRQAPL |
| E69K | IIPLKATSTPVSIKQYPMSQKARLGIKPHIQRLLDQGILVPCQSPWNTPLL |
| D200N | PVKKPGTNDYRPVQDLREVNKRVEDIHPTVPNPYNLLSGLPPSHQWYT |
| T330P | VLDLKDAFFCLRLHPTSQPLFAFEWRDPEMGISGQLTWTRLPQGFKNSP |
| L603W | TLFNEALHRDLADFRIQHPDLILLQYVDDLLLAATSELDCQQGTRALLQ |
| | TLGNLGYRASAKKAQICQKQVKYLGYLLKEGQRWLTEARKETVMGQ |
| | PTPKTPRQLREFLGTAGFCRLWIPGFAEMAAPLYPLTKPGTLFNWGPDQ |
| | QKAYQEIKQALLTAPALGLPDLTKPFELFVDEKQGYAKGVLTQKLGPW |
| | RRPVAYLSKKLDPVAAGWPPCLRMVAAIAVLTKDAGKLTMGQPLVILA |
| | PHAVEALVKQPPDRWLSNARMTHYQALLLDTDRVQFGPVVALNPATLL |
| | PLPEEGLQHNCLDILAEAHGTRPDLTDQPLPDADHTWYTDGSSLLQEG |
| | QRKAGAAVTTETEVIWAKALPAGTSAQRAELIALTQALKMAEGKKLN |
| | VYTDSRYAFATAHIHGEIYRRRGWLTSEGKEIKNKDEILALLKALFLPKR |
| | LSIIHCPGHQKGHSAEARGNRMADQAARKAAITETPDTSTLLIENSSP |
| | (SEQ ID NO: 109) |
| M-MLV RT | TLNIEDEYRLHETSKEPDVSLGSTWLSDFPQAWAETGGMGLAVRQAPL |
| D200N | IIPLKATSTPVSIKQYPMSQEARLGIKPHIQRLLDQGILVPCQSPWNTPLL |
| T330P | PVKKPGTNDYRPVQDLREVNKRVEDIHPTVPNPYNLLSGLPPSHQWYT |
| L603W | VLDLKDAFFCLRLHPTSQPLFAFEWRDPEMGISGQLTWTRLPQGFKNSP |
| E302R | TLFNEALHRDLADFRIQHPDLILLQYVDDLLLAATSELDCQQGTRALLQ |
| | TLGNLGYRASAKKAQICQKQVKYLGYLLKEGQRWLTEARKETVMGQ |
| | PTPKTPRQLRRFLGTAGFCRLWIPGFAEMAAPLYPLTKPGTLFNWGPDQ |
| | QKAYQEIKQALLTAPALGLPDLTKPFELFVDEKQGYAKGVLTQKLGPW |
| | RRPVAYLSKKLDPVAAGWPPCLRMVAAIAVLTKDAGKLTMGQPLVILA |
| | PHAVEALVKQPPDRWLSNARMTHYQALLLDTDRVQFGPVVALNPATLL |
| | PLPEEGLQHNCLDILAEAHGTRPDLTDQPLPDADHTWYTDGSSLLQEG |
| | QRKAGAAVTTETEVIWAKALPAGTSAQRAELIALTQALKMAEGKKLN |
| | VYTDSRYAFATAHIHGEIYRRRGWLTSEGKEIKNKDEILALLKALFLPKR |
| | LSIIHCPGHQKGHSAEARGNRMADQAARKAAITETPDTSTLLIENSSP |
| | (SEQ ID NO: 110) |
| M-MLV RT | TLNIEDEYRLHETSKEPDVSLGSTWLSDFPQAWAETGGMGLAVRQAPL |
| D200N | IIPLKATSTPVSIKQYPMSQEARLGIKPHIQRLLDQGILVPCQSPWNTPLL |
| T330P | PVKKPGTNDYRPVQDLREVNKRVEDIHPTVPNPYNLLSGLPPSHQWYT |
| L603W | VLDLKDAFFCLRLHPTSQPLFAFEWRDPEMGISGQLTWTRLPQGFKNSP |
| E607K | TLFNEALHRDLADFRIQHPDLILLQYVDDLLLAATSELDCQQGTRALLQ |
| | TLGNLGYRASAKKAQICQKQVKYLGYLLKEGQRWLTEARKETVMGQ |
| | PTPKTPRQLREFLGTAGFCRLWIPGFAEMAAPLYPLTKPGTLFNWGPDQ |
| | QKAYQEIKQALLTAPALGLPDLTKPFELFVDEKQGYAKGVLTQKLGPW |
| | RRPVAYLSKKLDPVAAGWPPCLRMVAAIAVLTKDAGKLTMGQPLVILA |
| | PHAVEALVKQPPDRWLSNARMTHYQALLLDTDRVQFGPVVALNPATLL |
| | PLPEEGLQHNCLDILAEAHGTRPDLTDQPLPDADHTWYTDGSSLLQEG |
| | QRKAGAAVTTETEVIWAKALPAGTSAQRAELIALTQALKMAEGKKLN |
| | VYTDSRYAFATAHIHGEIYRRRGWLTSKGKEIKNKDEILALLKALFLPK |
| | RLSIIHCPGHQKGHSAEARGNRMADQAARKAAITETPDTSTLLIENSSP |
| | (SEQ ID NO: 111) |
| M-MLV RT | TLNIEDEYRLHETSKEPDVSLGSTWLSDFPQAWAETGGMGLAVRQAPL |
| D200N | IIPLKATSTPVSIKQYPMSQEARLGIKPHIQRLLDQGILVPCQSPWNTPLL |
| T330P | PVKKPGTNDYRPVQDLREVNKRVEDIHPTVPNPYNLLSGPPPSHQWYT |
| L603W | VLDLKDAFFCLRLHPTSQPLFAFEWRDPEMGISGQLTWTRLPQGFKNSP |
| L139P | TLFNEALHRDLADFRIQHPDLILLQYVDDLLLAATSELDCQQGTRALLQ |
| | TLGNLGYRASAKKAQICQKQVKYLGYLLKEGQRWLTEARKETVMGQ |
| | PTPKTPRQLREFLGTAGFCRLWIPGFAEMAAPLYPLTKPGTLFNWGPDQ |
| | QKAYQEIKQALLTAPALGLPDLTKPFELFVDEKQGYAKGVLTQKLGPW |
| | RRPVAYLSKKLDPVAAGWPPCLRMVAAIAVLTKDAGKLTMGQPLVILA |
| | PHAVEALVKQPPDRWLSNARMTHYQALLLDTDRVQFGPVVALNPATLL |
| | PLPEEGLQHNCLDILAEAHGTRPDLTDQPLPDADHTWYTDGSSLLQEG |
| | QRKAGAAVTTETEVIWAKALPAGTSAQRAELIALTQALKMAEGKKLN |
| | VYTDSRYAFATAHIHGEIYRRRGWLTSEGKEIKNKDEILALLKALFLPKR |
| | LSIIHCPGHQKGHSAEARGNRMADQAARKAAITETPDTSTLLIENSSP |
| | (SEQ ID NO: 112) |
| M-MLV RT | TLNIEDEYRLHETSKEPDVSLGSTWLSDFPQAWAETGGMGLAVRQAPL |
| D200N | IIPLKATSTPVSIKQYPMSQEARLGIKPHIQRLLDQGILVPCQSPWNTPLL |
| T330P | PVKKPGTNDYRPVQDLREVNKRVEDIHPTVPNPYNLLSGLPPSHQWYT |
| L603W | VLDLKDAFFCLRLHPTSQPLFAFEWRDPEMGISGQLTWTRLPQGFKNSP |
| L435G | TLFNEALHRDLADFRIQHPDLILLQYVDDLLLAATSELDCQQGTRALLQ |
| | TLGNLGYRASAKKAQICQKQVKYLGYLLKEGQRWLTEARKETVMGQ |
| | PTPKTPRQLREFLGTAGFCRLWIPGFAEMAAPLYPLTKPGTLFNWGPDQ |
| | QKAYQEIKQALLTAPALGLPDLTKPFELFVDEKQGYAKGVLTQKLGPW |
| | RRPVAYLSKKLDPVAAGWPPCLRMVAAIAVLTKDAGKLTMGQPLVIGA |
| | PHAVEALVKQPPDRWLSNARMTHYQALLLDTDRVQFGPVVALNPATLL |
| | PLPEEGLQHNCLDILAEAHGTRPDLTDQPLPDADHTWYTDGSSLLQEG |
| | QRKAGAAVTTETEVIWAKALPAGTSAQRAELIALTQALKMAEGKKLN |
| | VYTDSRYAFATAHIHGEIYRRRGWLTSEGKEIKNKDEILALLKALFLPKR |
| | LSIIHCPGHQKGHSAEARGNRMADQAARKAAITETPDTSTLLIENSSP |
| | (SEQ ID NO: 113) |
| M-MLV RT | TLNIEDEYRLHETSKEPDVSLGSTWLSDFPQAWAETGGMGLAVRQAPL |
| D200N | IIPLKATSTPVSIKQYPMSQEARLGIKPHIQRLLDQGILVPCQSPWNTPLL |
| T330P | PVKKPGTNDYRPVQDLREVNKRVEDIHPTVPNPYNLLSGLPPSHQWYT |
| L603W | VLDLKDAFFCLRLHPTSQPLFAFEWRDPEMGISGQLTWTRLPQGFKNSP |
| N454K | TLFNEALHRDLADFRIQHPDLILLQYVDDLLLAATSELDCQQGTRALLQ |
| | TLGNLGYRASAKKAQICQKQVKYLGYLLKEGQRWLTEARKETVMGQ |
| | PTPKTPRQLREFLGTAGFCRLWIPGFAEMAAPLYPLTKPGTLFNWGPDQ |
| | QKAYQEIKQALLTAPALGLPDLTKPFELFVDEKQGYAKGVLTQKLGPW |
| | RRPVAYLSKKLDPVAAGWPPCLRMVAAIAVLTKDAGKLTMGQPLVILA |
| | PHAVEALVKQPPDRWLSKARMTHYQALLLDTDRVQFGPVVALNPATLL |
| | PLPEEGLQHNCLDILAEAHGTRPDLTDQPLPDADHTWYTDGSSLLQEG |
| | QRKAGAAVTTETEVIWAKALPAGTSAQRAELIALTQALKMAEGKKLN |
| | VYTDSRYAFATAHIHGEIYRRRGWLTSEGKEIKNKDEILALLKALFLPKR |
| | LSIIHCPGHQKGHSAEARGNRMADQAARKAAITETPDTSTLLIENSSP |
| | (SEQ ID NO: 114) |
| M-MLV RT | TLNIEDEYRLHETSKEPDVSLGSTWLSDFPQAWAETGGMGLAVRQAPL |
| D200N | IIPLKATSTPVSIKQYPMSQEARLGIKPHIQRLLDQGILVPCQSPWNTPLL |
| T330P | PVKKPGTNDYRPVQDLREVNKRVEDIHPTVPNPYNLLSGLPPSHQWYT |
| L603W | VLDLKDAFFCLRLHPTSQPLFAFEWRDPEMGISGQLTWTRLPQGFKNSP |
| T306K | TLFNEALHRDLADFRIQHPDLILLQYVDDLLLAATSELDCQQGTRALLQ |
| | TLGNLGYRASAKKAQICQKQVKYLGYLLKEGQRWLTEARKETVMGQ |
| | PTPKTPRQLREFLGKAGFCRLWIPGFAEMAAPLYPLTKPGTLFNWGPD |
| | QQKAYQEIKQALLTAPALGLPDLTKPFELFVDEKQGYAKGVLTQKLGP |
| | WRRPVAYLSKKLDPVAAGWPPCLRMVAAIAVLTKDAGKLTMGQPLVIL |
| | APHAVEALVKQPPDRWLSNARMTHYQALLLDTDRVQFGPVVALNPAT |
| | LLPLPEEGLQHNCLDILAEAHGTRPDLTDQPLPDADHTWYTDGSSLLQ |
| | EGQRKAGAAVTTETEVIWAKALPAGTSAQRAELIALTQALKMAEGKKL |
| | NVYTDSRYAFATAHIHGEIYRRRGWLTSEGKEIKNKDEILALLKALFLP |
| | KRLSIIHCPGHQKGHSAEARGNRMADQAARKAAITETPDTSTLLIENSS |
| | P(SEQ ID NO: 115) |
| M-MLV RT | TLNIEDEYRLHETSKEPDVSLGSTWLSDFPQAWAETGGMGLAVRQAPL |
| D200N | IIPLKATSTPVSIKQYPMSQEARLGIKPHIQRLLDQGILVPCQSPWNTPLL |
| T330P | PVKKPGTNDYRPVQDLREVNKRVEDIHPTVPNPYNLLSGLPPSHQWYT |
| L603W | VLDLKDAFFCLRLHPTSQPLFAFEWRDPEMGISGQLTWTRLPQGFKNSP |
| W313F | TLFNEALHRDLADFRIQHPDLILLQYVDDLLLAATSELDCQQGTRALLQ |
| | TLGNLGYRASAKKAQICQKQVKYLGYLLKEGQRWLTEARKETVMGQ |
| | PTPKTPRQLREFLGTAGFCRLFIPGFAEMAAPLYPLTKPGTLFNWGPDQ |
| | QKAYQEIKQALLTAPALGLPDLTKPFELFVDEKQGYAKGVLTQKLGPW |
| | RRPVAYLSKKLDPVAAGWPPCLRMVAAIAVLTKDAGKLTMGQPLVILA |
| | PHAVEALVKQPPDRWLSNARMTHYQALLLDTDRVQFGPVVALNPATLL |
| | PLPEEGLQHNCLDILAEAHGTRPDLTDQPLPDADHTWYTDGSSLLQEG |
| | QRKAGAAVTTETEVIWAKALPAGTSAQRAELIALTQALKMAEGKKLN |
| | VYTDSRYAFATAHIHGEIYRRRGWLTSEGKEIKNKDEILALLKALFLPKR |
| | LSIIHCPGHQKGHSAEARGNRMADQAARKAAITETPDTSTLLIENSSP |
| | (SEQ ID NO: 116) |
| M-MLV RT | TLNIEDEYRLHETSKEPDVSLGSTWLSDFPQAWAETGGMGLAVRQAPL |
| D200N | IIPLKATSTPVSIKQYPMSQEARLGIKPHIQRLLDQGILVPCQSPWNTPLL |
| T330P | PVKKPGTNDYRPVQDLREVNKRVEDIHPTVPNPYNLLSGLPPSHQWYT |
| L603W | VLDLKDAFFCLRLHPTSQPLFAFEWRDPEMGISGQLTWTRLPQGFKNSP |
| D524G | TLFNEALHRDLADFRIQHPDLILLQYVDDLLLAATSELDCQQGTRALLQ |
| E562Q | TLGNLGYRASAKKAQICQKQVKYLGYLLKEGQRWLTEARKETVMGQ |
| D583N | PTPKTPRQLREFLGTAGFCRLWIPGFAEMAAPLYPLTKPGTLFNWGPDQ |
| | QKAYQEIKQALLTAPALGLPDLTKPFELFVDEKQGYAKGVLTQKLGPW |
| | RRPVAYLSKKLDPVAAGWPPCLRMVAAIAVLTKDAGKLTMGQPLVILA |
| | PHAVEALVKQPPDRWLSNARMTHYQALLLDTDRVQFGPVVALNPATLL |
| | PLPEEGLQHNCLDILAEAHGTRPDLTDQPLPDADHTWYTGGSSLLQEG |
| | QRKAGAAVTTETEVIWAKALPAGTSAQRAQLIALTQALKMAEGKKLN |
| | VYTNSRYAFATAHIHGEIYRRRGWLTSEGKEIKNKDEILALLKALFLPKR |
| | LSIIHCPGHQKGHSAEARGNRMADQAARKAAITETPDTSTLLIENSSP |
| | (SEQ ID NO: 117) |
| M-MLV RT | TLNIEDEYRLHETSKEPDVSLGSTWLSDFPQAWAETGGMGLAVRQAPL |
| D200N | IIPLKATSTPVSIKQYPMSQEARLGIKPHIQRLLDQGILVPCQSPWNTPLL |
| T330P | PVKKPGTNDYRPVQDLREVNKRVEDIHPTVPNPYNLLSGLPPSHQWYT |
| L603W | VLDLKDAFFCLRLHPTSQPLFAFEWRDPEMGISGQLTWTRLPQGFKNSP |
| E302R | TLFNEALHRDLADFRIQHPDLILLQYVDDLLLAATSELDCQQGTRALLQ |
| W313F | TLGNLGYRASAKKAQICQKQVKYLGYLLKEGQRWLTEARKETVMGQ |
| | PTPKTPRQLRRFLGTAGFCRLFIPGFAEMAAPLYPLTKPGTLFNWGPDQ |
| | QKAYQEIKQALLTAPALGLPDLTKPFELFVDEKQGYAKGVLTQKLGPW |
| | RRPVAYLSKKLDPVAAGWPPCLRMVAAIAVLTKDAGKLTMGQPLVILA |
| | PHAVEALVKQPPDRWLSNARMTHYQALLLDTDRVQFGPVVALNPATLL |
| | PLPEEGLQHNCLDILAEAHGTRPDLTDQPLPDADHTWYTDGSSLLQEG |
| | QRKAGAAVTTETEVIWAKALPAGTSAQRAELIALTQALKMAEGKKLN |
| | VYTDSRYAFATAHIHGEIYRRRGWLTSEGKEIKNKDEILALLKALFLPKR |
| | LSIIHCPGHQKGHSAEARGNRMADQAARKAAITETPDTSTLLIENSSP |
| | (SEQ ID NO: 118) |
| M-MLV RT | TLNIEDEYRLHETSKEPDVSLGSTWLSDFPQAWAETGGMGLAVRQAPL |
| D200N | IIPLKATSTPVSIKQYPMSQEARLGIKPHIQRLLDQGILVPCQSPWNTPLL |
| T330P | PVKKPGTNDYRPVQDLREVNKRVEDIHPTVPNPYNLLSGPPPSHQWYT |
| L603W | VLDLKDAFFCLRLHPTSQPLFAFEWRDPEMGISGQLTWTRLPQGFKNSP |
| E607K | TLFNEALHRDLADFRIQHPDLILLQYVDDLLLAATSELDCQQGTRALLQ |
| L139P | TLGNLGYRASAKKAQICQKQVKYLGYLLKEGQRWLTEARKETVMGQ |
| | PTPKTPRQLREFLGTAGFCRLWIPGFAEMAAPLYPLTKPGTLFNWGPDQ |
| | QKAYQEIKQALLTAPALGLPDLTKPFELFVDEKQGYAKGVLTQKLGPW |
| | RRPVAYLSKKLDPVAAGWPPCLRMVAAIAVLTKDAGKLTMGQPLVILA |
| | PHAVEALVKQPPDRWLSNARMTHYQALLLDTDRVQFGPVVALNPATLL |
| | PLPEEGLQHNCLDILAEAHGTRPDLTDQPLPDADHTWYTDGSSLLQEG |
| | QRKAGAAVTTETEVIWAKALPAGTSAQRAELIALTQALKMAEGKKLN |
| | VYTDSRYAFATAHIHGEIYRRRGWLTSKGKEIKNKDEILALLKALFLPK |
| | RLSIIHCPGHQKGHSAEARGNRMADQAARKAAITETPDTSTLLIENSSP |
| | (SEQ ID NO: 119) |
| M-MLV RT | TLNIEDEYRLHETSKEPDVSLGSTWLSDFPQAWAETGGMGLAVRQAPL |
| P51L S67K | IILLKATSTPVSIKQYPMKQEARLGIKPHIQRLLDQGILVPCQSPWNTPL |
| T197A | LPVKKPGTNDYRPVQDLREVNKRVEDIHPTVPNPYNLLSGLPPSHQWY |
| H204R | TVLDLKDAFFCLRLHPTSQPLFAFEWRDPEMGISGQLTWTRLPQGFKN |
| E302K | SPALFDEALRRDLADFRIQHPDLILLQYVDDLLLAATSELDCQQGTRAL |
| F309N | LQTLGNLGYRASAKKAQICQKQVKYLGYLLKEGQRWLTEARKETVM |
| W313F | GQPTPKTPRQLRKFLGTAGNCRLFIPGFAEMAAPLYPLTKPGTLFNWGP |
| T330P | DQQKAYQEIKQALLTAPALGLPDLTKPFELFVDEKQGYAKGVLTQKLG |
| L435G | PWRRPVAYLSKKLDPVAAGWPPCLRMVAAIAVLTKDAGKLTMGQPLVI |
| N454K | GAPHAVEALVKQPPDRWLSKARMTHYQALLLDTDRVQFGPVVALNPA |
| D524G | TLLPLPEEGLQHNCLDILAEAHGTRPDLTDQPLPDADHTWYTGGSSLL |
| D583N | QEGQRKAGAAVTTETEVIWAKALPAGTSAQRAELIALTQALKMAEGK |
| H594Q | KLNVYTNSRYAFATAHIQGEIYRRRGLLTSEGKEIKNKDEILALLKALFL |
| D653N | PKRLSIIHCPGHQKGHSAEARGNRMANQAARKAAITETPDTSTLLIENS |
| | SP (SEQ ID NO: 120) |
| M-MLV RT | TLNIEDEYRLHETSKEPDVSLGSTWLSDFPQAWAETGGMGLAVRQAPL |
| P51L S67K | IILLKATSTPVSIKQYPMKQEARLGIKPHIQRLLDQGILVPCQSPWNTPL |
| T197A | LPVKKPGTNDYRPVQDLREVNKRVEDIHPTVPNPYNLLSGLPPSHQWY |
| D200N | TVLDLKDAFFCLRLHPTSQPLFAFEWRDPEMGISGQLTWTRLPQGFKN |
| H204R | SPALFNEALRRDLADFRIQHPDLILLQYVDDLLLAATSELDCQQGTRAL |
| E302K | LQTLGNLGYRASAKKAQICQKQVKYLGYLLKEGQRWLTEARKETVM |
| F309N | GQPTPKTPRQLRKFLGTAGNCRLFIPGFAEMAAPLYPLTKPGTLFNWGP |
| W313F | DQQKAYQEIKQALLTAPALGLPDLTKPFELFVDEKQGYAKGVLTQKLG |
| T330P L345G | PWRRPVAYLSKKLDPVAAGWPPCLRMVAAIAVLTKDAGKLTMGQPLVI |
| N454K | GAPHAVEALVKQPPDRWLSKARMTHYQALLLDTDRVQFGPVVALNPA |
| D524G | TLLPLPEEGLQHNCLDILAEAHGTRPDLTDQPLPDADHTWYTGGSSLL |
| D583N | QEGQRKAGAAVTTETEVIWAKALPAGTSAQRAELIALTQALKMAEGK |
| H594Q | KLNVYTNSRYAFATAHIQGEIYRRRGLLTSEGKEIKNKDEILALLKALFL |
| D653N | PKRLSIIHCPGHQKGHSAEARGNRMANQAARKAAITETPDTSTLLIENS |
| | SP (SEQ ID NO: 121) |
| M-MLV RT | TLNIEDEYRLHETSKEPDVSLGSTWLSDFPQAWAETGGMGLAVRQAPL |
| D200N T330P | IIPLKATSTPVSIKQYPMSQEARLGIKPHIQRLLDQGILVPCQSPWNTPLL |
| L603W | PVKKPGTNDYRPVQDLREVNKRVEDIHPTVPNPYNLLSGLPPSHQWYT |
| T306K | VLDLKDAFFCLRLHPTSQPLFAFEWRDPEMGISGQLTWTRLPQGFKNSP |
| W313F | TLFNEALHRDLADFRIQHPDLILLQYVDDLLLAATSELDCQQGTRALLQ |
| IN PE2 | TLGNLGYRASAKKAQICQKQVKYLGYLLKEGQRWLTEARKETVMGQ |
| | PTPKTPRQLREFLGKAGFCRLFIPGFAEMAAPLYPLTKPGTLFNWGPDQ |
| | QKAYQEIKQALLTAPALGLPDLTKPFELFVDEKQGYAKGVLTQKLGPW |
| | RRPVAYLSKKLDPVAAGWPPCLRMVAAIAVLTKDAGKLTMGQPLVILA |
| | PHAVEALVKQPPDRWLSNARMTHYQALLLDTDRVQFGPVVALNPATLL |
| | PLPEEGLQHNCLDILAEAHGTRPDLTDQPLPDADHTWYTDGSSLLQEG |
| | QRKAGAAVTTETEVIWAKALPAGTSAQRAELIALTQALKMAEGKKLN |
| | VYTDSRYAFATAHIHGEIYRRRGWLTSEGKEIKNKDEILALLKALFLPKR |
| | LSIIHCPGHQKGHSAEARGNRMADQAARKAAITETPDTSTLLIENSSP |
| | (SEQ ID NO: 122) |

[0504] The prime editor (PE) system described here contemplates any publicly-available reverse transcriptase described or disclosed in any of the following U.S. patents (each of which are incorporated by reference in their entireties): U.S. Pat. Nos. 10,202,658; 10,189,831; 10,150,955; 9,932,567; 9,783,791; 9,580,698; 9,534,201; and 9,458,484, and any variant thereof that can be made using known methods for installing mutations, or known methods for evolving proteins. The following references describe reverse transcriptases in art. Each of their disclosures are incorporated herein by reference in their entireties.
[0505] Herzig, E., Voronin, N., Kucherenko, N. & Hizi, A. A Novel Leu92 Mutant of HIV-1 Reverse Transcriptase with a Selective Deficiency in Strand Transfer Causes a Loss of Viral Replication. J. Virol. 89, 8119-8129 (2015).
[0506] Mohr, G. et al. A Reverse Transcriptase-Cas1 Fusion Protein Contains a Cas6 Domain Required for Both CRISPR RNA Biogenesis and RNA Spacer Acquisition. Mol. Cell 72, 700-714.e8 (2018).
[0507] Zhao, C., Liu, F. & Pyle, A. M. An ultraprocessive, accurate reverse transcriptase encoded by a metazoan group II intron. RNA 24, 183-195 (2018).
[0508] Zimmerly, S. & Wu, L. An Unexplored Diversity of Reverse Transcriptases in Bacteria. Microbiol Spectr 3, MDNA3-0058-2014 (2015).
[0509] Ostertag, E. M. & Kazazian Jr, H. H. Biology of Mammalian L1 Retrotransposons. Annual Review of Genetics 35, 501-538 (2001).
[0510] Perach, M. & Hizi, A. Catalytic Features of the Recombinant Reverse Transcriptase of Bovine Leukemia Virus Expressed in Bacteria. Virology 259, 176-189 (1999).
[0511] Lim, D. et al. Crystal structure of the moloney murine leukemia virus RNase H domain. J. Virol. 80, 8379-8389 (2006).
[0512] Zhao, C. & Pyle, A. M. Crystal structures of a group II intron maturase reveal a missing link in spliceosome evolution. Nature Structural & Molecular Biology 23, 558-565 (2016).
[0513] Griffiths, D. J. Endogenous retroviruses in the human genome sequence. Genome Biol. 2, REVIEWS1017 (2001).
[0514] Baranauskas, A. et al. Generation and characterization of new highly thermostable and processive M-MuLV reverse transcriptase variants. Protein Eng Des Sel 25, 657-668 (2012).
[0515] Zimmerly, S., Guo, H., Perlman, P. S. & Lambowltz, A. M. Group II intron mobility occurs by target DNA-primed reverse transcription. Cell 82, 545-554 (1995).
[0516] Feng, Q., Moran, J. V., Kazazian, H. H. & Boeke, J. D. Human L1 retrotransposon encodes a conserved endonuclease required for retrotransposition. Cell 87, 905-916 (1996).
[0517] Berkhout, B., Jebbink, M. & Zsiros, J. Identification of an Active Reverse Transcriptase Enzyme Encoded by a Human Endogenous HERV-K Retrovirus. Journal of Virology 73, 2365-2375 (1999).
[0518] Kotewicz, M. L., Sampson, C. M., D'Alessio, J. M. & Gerard, G. F. Isolation of cloned Moloney murine leukemia virus reverse transcriptase lacking ribonuclease H activity. Nucleic Acids Res 16, 265-277 (1988).
[0519] Arezi, B. & Hogrefe, H. Novel mutations in Moloney Murine Leukemia Virus reverse transcriptase increase thermostability through tighter binding to template-primer. Nucleic Acids Res 37, 473-481 (2009).
[0520] Blain, S. W. & Goff, S. P. Nuclease activities of Moloney murine leukemia virus reverse transcriptase. Mutants with altered substrate specificities. J. Biol. Chem. 268, 23585-23592 (1993).
[0521] Xiong, Y. & Eickbush, T. H. Origin and evolution of retroelements based upon their reverse transcriptase sequences. EMBO J 9, 3353-3362 (1990).
[0522] Herschhorn, A. & Hizi, A. Retroviral reverse transcriptases. Cell. Mol. Life Sci. 67, 2717-2747 (2010).
[0523] Taube, R., Loya, S., Avidan, O., Perach, M. & Hizi, A. Reverse transcriptase of mouse mammary tumour virus: expression in bacteria, purification and biochemical characterization. Biochem. J. 329 (Pt 3), 579-587 (1998).
[0524] Liu, M. et al. Reverse Transcriptase-Mediated Tropism Switching in Bordetella Bacteriophage. Science 295, 2091-2094 (2002).
[0525] Luan, D. D., Korman, M. H., Jakubczak, J. L. & Eickbush, T. H. Reverse transcription of R2Bm RNA is primed by a nick at the chromosomal target site: a mechanism for non-LTR retrotransposition. Cell 72, 595-605 (1993).
[0526] Nottingham, R. M. et al. RNA-seq of human reference RNA samples using a thermostable group II intron reverse transcriptase. RNA 22, 597-613 (2016).
[0527] Telesnitsky, A. & Goff, S. P. RNase H domain mutations affect the interaction between Moloney murine leukemia virus reverse transcriptase and its primer-template. Proc. Natl. Acad. Sci. U.S.A. 90, 1276-1280 (1993).
[0528] Halvas, E. K., Svarovskaia, E. S. & Pathak, V. K. Role of Murine Leukemia Virus Reverse Transcriptase Deoxyribonucleoside Triphosphate-Binding Site in Retroviral Replication and In Vivo Fidelity. Journal of Virology 74, 10349-10358 (2000).
[0529] Nowak, E. et al. Structural analysis of monomeric retroviral reverse transcriptase in complex with an RNA/DNA hybrid. Nucleic Acids Res 41, 3874-3887 (2013).
[0530] Stamos, J. L., Lentzsch, A. M. & Lambowitz, A. M. Structure of a Thermostable Group II Intron Reverse Transcriptase with Template-Primer and Its Functional and Evolutionary Implications. Molecular Cell 68, 926-939.e4 (2017).
[0531] Das, D. & Georgiadis, M. M. The Crystal Structure of the Monomeric Reverse Transcriptase from Moloney Murine Leukemia Virus. Structure 12, 819-829 (2004).
[0532] Avidan, O., Meer, M. E., Oz, I. & Hizi, A. The processivity and fidelity of DNA synthesis exhibited by the reverse transcriptase of bovine leukemia virus. European Journal of Biochemistry 269, 859-867 (2002).
[0533] Gerard, G. F. et al. The role of template-primer in protection of reverse transcriptase from thermal inactivation. Nucleic Acids Res 30, 3118-3129 (2002).
[0534] Monot, C. et al. The Specificity and Flexibility of L1 Reverse Transcription Priming at Imperfect T-Tracts. PLOS Genetics 9, e1003499 (2013).
[0535] Mohr, S. et al. Thermostable group II intron reverse transcriptase fusion proteins and their use in cDNA synthesis and next-generation RNA sequencing. RNA 19, 958-970 (2013).

[0536] Any of the references noted above which relate to reverse transriptases are hereby incorporated by reference in their entireties, if not already stated so.

### [4] PE Fusion Proteins

[0537] The prime editor (PE) system described herein contemplate fusion proteins comprising a napDNAbp and a polymerase (e.g., DNA-dependent DNA polymerase or RNA-dependent DNA polymerase, such as, reverse transcriptase), and optionally joined by a linker. The application contemplates any suitable napDNAbp and polymerase (e.g., DNA-dependent DNA polymerase or RNA-dependent DNA polymerase, such as, reverse transcriptase) to be combined in a single fusion protein. Examples of napDNAbps and polymerases (e.g., DNA-dependent DNA polymerase or RNA-dependent DNA polymerase, such as, reverse transcriptase) are each defined herein. Since polymerases are well-known in the art, and the amino acid sequences are readily available, this disclosure is not meant in any way to be limited to those specific polymerases identified herein.

[0538] In various embodiments, the fusion proteins may comprise any suitable structural configuration. For example, the fusion protein may comprise from the N-terminus to the C-terminus direction, a napDNAbp fused to a polymerase (e.g., DNA-dependent DNA polymerase or RNA-dependent DNA polymerase, such as, reverse transcriptase). In other embodiments, the fusion protein may comprise from the N-terminus to the C-terminus direction, a polymerase (e.g., a reverse transcriptase) fused to a napDNAbp. The fused domain may optionally be joined by a linker, e.g., an amino acid sequence. In other embodiments, the fusion proteins may comprise the structure NH₂-[napDNAbp]-[polymerase]-COOH; or NH₂-[polymerase]-[napDNAbp]-COOH, wherein each instance of “]-[” indicates the presence of an optional linker sequence. In embodiments wherein the polymerase is a reverse transcriptase, the fusion proteins may comprise the structure NH₂-[napDNAbp]-[RT]-COGOH; or NH₂-[RT]-[napDNAbp]-COGOH, wherein each instance of “]-[” indicates the presence of an optional linker sequence.

[0539] An exemplary fusion protein is depicted in FIG. 14, which shows a fusion protein comprising an MLV reverse transcriptase (“MLV-RT”) fused to a nickase Cas9 (“Cas9(H840A)”) via a linker sequence. This example is not intended to limit scope of fusion proteins that may be utilized for the prime editor (PE) system described herein.

[0540] In various embodiments, the prime editor fusion protein may have the following amino acid sequence (referred to herein as “PE1”), which includes a Cas9 variant comprising an H840A mutation (i.e., a Cas9 nickase) and an M-MLV RT wild type, as well as an N-terminal NLS sequence (19 amino acids) and an amino acid linker (32 amino acids) that joins the C-terminus of the Cas9 nickase domain to the N-terminus of the RT domain. The PE1 fusion protein has the following structure: [NLS]-[Cas9(H840A)]-[linker]-[MMLV_RT(wt)]. The amino acid sequence of PE1 and its individual components are as follows:

| DESCRIPTION | SEQUENCE |
|---|---|
| PE1 FUSION | MKRTADGSEFESPKKKRKVDKKYSIGLDIGTNSVGWAVITDEYKVPS |
| PROTEIN | KKFKVLGNTDRHSIKKNLIGALLFDSGETAEATRLKRTARRRYTRR |
| CAS9(H840A)- | KNRICYLQEIFSNEMAKVDDSFFHRLEESFLVEEDKKHERHPIFGNI |
| MMLV_RT(WT) | VDEVAYHEKYPTIYHLRKKLVDSTDKADLRLIYLALAHMIKFRGHF |
| | LIEGDLNPDNSDVDKLFIQLVQTYNQLFEENPINASGVDAKAILSAR |
| | LSKSRRLENLIAQLPGEKKNGLFGNLIALSLGLTPNFKSNFDLAEDA |
| | KLQLSKDTYDDDLDNLLAQIGDQYADLFLAAKNLSDAILLSDILRV |
| | NTEITKAPLSASMIKRYDEHHQDLTLLKALVRQQLPEKYKEIFFDQ |
| | SKNGYAGYIDGGASQEEFYKFIKPILEKMDGTEELLVKLNREDLLR |
| | KQRTFDNGSIPHQIHLGELHAILRRQEDFYPFLKDNREKIEKILTFR |
| | IPYYVGPLARGNSRFAWMTRKSEETITPWNFEEVVDKGASAQSFIE |
| | RMTNFDKNLPNEKVLPKHSLLYEYFTVYNELTKVKYVTEGMRKPA |
| | FLSGEQKKAIVDLLFKTNRKVTVKQLKEDYFKKIECFDSVEISGVE |
| | DRFNASLGTYHDLLKIIKDKDFLDNEENEDILEDIVLTLTLFEDREM |
| | IEERLKTYAHLFDDKVMKQLKRRRYTGWGRLSRKLINGIRDKQSG |
| | KTILDFLKSDGFANRNFMQLIHDDSLTFKEDIQKAQVSGQGDSLHE |
| | HIANLAGSPAIKKGILQTVKVVDELVKVMGRHKPENIVIEMARENQ |
| | TTQKGQKNSRERMKRIEEGIKELGSQILKEHPVENTQLQNEKLYL |
| | YYLQNGRDMYVDQELDINRLSDYDVDAIVPQSFLKDDSIDNKVLTR |
| | SDKNRGKSDNVPSEEVVKKMKNYWRQLLNAKLITQRKFDNLTKA |
| | ERGGLSELDKAGFIKRQLVETRQITKHVAQILDSRMNTKYDENDK |
| | LIREVKVITLKSKLVSDFRKDFQFYKVREINNYHHAHDAYLNAVVG |
| | TALIKKYPKLESEFVYGDYKVYDVRKMIAKSEQEIGKATAKYFFYS |
| | NIMNFFKTEITLANGEIRKRPLIETNGETGEIVWDKGRDFATVRKV |
| | LSMPQVNIVKKTEVQTGGFSKESILPKRNSDKLIARKKDWDPKKY |
| | GGFDSPTVAYSVLVVAKVEKGKSKKLKSVKELLGITIMERSSFEKNP |
| | IDFLEAKGYKEVKKDLIIKLPKYSLFELENGRKRMLASAGELQKG |
| | NELALPSKYVNFLYLASHYEKLKGSPEDNEQKQLFVEQHKHYLDE |
| | IIEQISEFSKRVILADANLDKVLSAYNKHRDKPIREQAENIIHLFTLT |
| | NLGAPAAFKYFDTTIDRKRYTSTKEVLDATLIHQSITGLYETRIDLS |
| | QLGGDSGGSSGGSSGSETPGTSESATPESSGGSSGGSSTLNIEDEYRLH |
| | ETSKEPDVSLGSTWLSDFPQAWAETGGMGLAVRQAPLIIPLKATSTPVSIKQ |
| | YPMSQEARLGIKPHIQRLLDQGILVPCQSPWNTPLLPVKKPGTNDYRPVQD |
| | LREVNKRVEDIHPTVPNPYNLLSGLPPSHQWYTVLDLKDAFFCLRLHPTSQ |
| | PLFAFEWRDPEMGISGQLTWTRLPQGFKNSPTLFDEALHRDLADFRIQHP |
| | DLILLQYVDDLLLAATSELDCQQGTRALLQTLGNLGYRASAKKAQICQKQV |
| | KYLGYLLKEGQRWLTEARKETVMGQPTPKTPRQLREFLGTAGFCRLWIPG |
| | FAEMAAPLYPLTKTGTLFNWGPDQQKAYQEIKQALLTAPALGLPDLTKPFE |
| | LFVDEKQGYAKGVLTQKLGPWRRPVAYLSKKLDPVAAGWPPCLRMVAAIAV |
| | LTKDAGKLTMGQPLVILAPHAVEALVKQPPDRWLSNARMTHYQALLLDTD |
| | RVQFGPVVALNPATLLPLPEEGLQHNCLDILAEAHGTRPDLTDQPLPDADH |
| | TWYTDGSSLLQEGQRKAGAAVTTETEVIWAKALPAGTSAQRAELIALTQALK |
| | MAEGKKLNVYTDSRYAFATAHIHGEIYRRRGLLTSEGKEIKNKDEILALLKAL |
| | FLPKRLSIIHCPGHQKGHSAEARGNRMADQAARKAAITETPDTSTLLIENSS |
| | PSGGSKRTADGSEFEPKKKRKV (SEQ ID NO: 123) |
| | KEY: |
| | NUCLEAR LOCALIZATION SEQUENCE (NLS) TOP: (SEQ ID NO: 124), |
| | BOTTOM:(SEQ ID NO: 133) |
| | CAS9(H840A) (SEQ ID NO: 126) |
| | 33-AMINO ACID LINKER (SEQ ID NO: 127) |
| | M-MLV REVERSE TRANSCRIPTASE (SEQ ID NO: 128) |
| PE1-N- | MKRTADGSEFESPKKKRKV (SEQ ID NO: 124) |
| TERMINAL | |
| NLS | |
| PE1-CAS9 | DKKYSIGLDIGTNSVGWAVITDEYKVPSKKFKVLGNTDRHSIKKNLIGA |
| (H840A) | LLFDSGETAEATRLKRTARRRYTRRKNRICYLQEIFSNEMAKVDDSFFH |
| (MET | RLEESFLVEEDKKHERHPIFGNIVDEVAYHEKYPTIYHLRKKLVDSTDK |
| MINUS) | ADLRLIYLALAHMIKFRGHFLIEGDLNPDNSDVDKLFIQLVQTYNQLFE |
| | ENPINASGVDAKAILSARLSKSRRLENLIAQLPGEKKNGLFGNLIALSLG |
| | LTPNFKSNFDLAEDAKLQLSKDTYDDDLDNLLAQIGDQYADLFLAAKN |
| | LSDAILLSDILRVNTEITKAPLSASMIKRYDEHHQDLTLLKALVRQQLPE |
| | KYKEIFFDQSKNGYAGYIDGGASQEEFYKFIKPILEKMDGTEELLVKLN |
| | REDLLRKQRTFDNGSIPHQIHLGELHAILRRQEDFYPFLKDNREKIEKIL |
| | TFRIPYYVGPLARGNSRFAWMTRKSEETITPWNFEEVVDKGASAQSFIE |
| | RMTNFDKNLPNEKVLPKHSLLYEYFTVYNELTKVKYVTEGMRKPAFLS |
| | GEQKKAIVDLLFKTNRKVTVKQLKEDYFKKIECFDSVEISGVEDRFNA |
| | SLGTYHDLLKIIKDKDFLDNEENEDILEDIVLTLTLFEDREMIEERLKTY |
| | AHLFDDKVMKQLKRRRYTGWGRLSRKLINGIRDKQSGKTILDFLKSD |
| | GFANRNFMQLIHDDSLTFKEDIQKAQVSGQGDSLHEHIANLAGSPAIKK |
| | GILQTVKVVDELVKVMGRHKPENIVIEMARENQTTQKGQKNSRERMK |
| | RIEEGIKELGSQILKEHPVENTQLQNEKLYLYYLQNGRDMYVDQELDIN |
| | RLSDYDVDAIVPQSFLKDDSIDNKVLTRSDKNRGKSDNVPSEEVVKKM |
| | KNYWRQLLNAKLITQRKFDNLTKAERGGLSELDKAGFIKRQLVETRQI |
| | TKHVAQILDSRMNTKYDENDKLIREVKVITLKSKLVSDFRKDFQFYKV |
| | REINNYHHAHDAYLNAVVGTALIKKYPKLESEFVYGDYKVYDVRKMI |
| | AKSEQEIGKATAKYFFYSNIMNFFKTEITLANGEIRKRPLIETNGETGEIV |
| | WDKGRDFATVRKVLSMPQVNIVKKTEVQTGGFSKESILPKRNSDKLIA |
| | RKKDWDPKKYGGFDSPTVAYSVLVVAKVEKGKSKKLKSVKELLGITIM |
| | ERSSFEKNPIDFLEAKGYKEVKKDLIIKLPKYSLFELENGRKRMLASAG |
| | ELQKGNELALPSKYVNFLYLASHYEKLKGSPEDNEQKQLFVEQHKHY |
| | LDEIIEQISEFSKRVILADANLDKVLSAYNKHRDKPIREQAENIIHLFTLT |
| | NLGAPAAFKYFDTTIDRKRYTSTKEVLDATLIHQSITGLYETRIDLSQLG |
| | GD (SEQ ID NO: 130) |
| PE1- | SGGSSGGSSGSETPGTSESATPESSGGSSGGSS (SEQ ID NO: 127) |
| LINKER | |
| BETWEEN | |
| CAS9 | |
| DOMAIN | |
| AND RT | |
| DOMAIN (33 | |
| AMINO | |
| ACIDS) | |
| PE-M- | TLNIEDEYRLHETSKEPDVSLGSTWLSDFPQAWAETGGMGLAVRQAPL |
| MLV RT | IIPLKATSTPVSIKQYPMSQEARLGIKPHIQRLLDQGILVPCQSPWNTPLL |
| | PVKKPGTNDYRPVQDLREVNKRVEDIHPTVPNPYNLLSGLPPSHQWYT |
| | VLDLKDAFFCLRLHPTSQPLFAFEWRDPEMGISGQLTWTRLPQGFKNSP |
| | TLFDEALHRDLADFRIQHPDLILLQYVDDLLLAATSELDCQQGTRALLQ |
| | TLGNLGYRASAKKAQICQKQVKYLGYLLKEGQRWLTEARKETVMGQ |
| | PTPKTPRQLREFLGTAGFCRLWIPGFAEMAAPLYPLTKTGTLFNWGPDQ |
| | QKAYQEIKQALLTAPALGLPDLTKPFELFVDEKQGYAKGVLTQKLGPW |
| | RRPVAYLSKKLDPVAAGWPPCLRMVAAIAVLTKDAGKLTMGQPLVILA |
| | PHAVEALVKQPPDRWLSNARMTHYQALLLDTDRVQFGPVVALNPATLL |
| | PLPEEGLQHNCLDILAEAHGTRPDLTDQPLPDADHTWYTDGSSLLQEG |
| | QRKAGAAVTTETEVIWAKALPAGTSAQRAELIALTQALKMAEGKKLN |
| | VYTDSRYAFATAHIHGEIYRRRGLLTSEGKEIKNKDEILALLKALFLPKR |
| | LSIIHCPGHQKGHSAEARGNRMADQAARKAAITETPDTSTLLIENSSP |
| | (SEQ ID NO: 132) |
| PE1-C- | SGGSKRTADGSEFEPKKKRKV (SEQ ID NO: 133) |
| TERMINAL | |
| NLS | |

[0541] In another embodiment, the prime editor fusion protein may have the following amino acid sequence (referred to herein as “PE2”), which includes a Cas9 variant comprising an H840A mutation (i.e., a Cas9 nickase) and an M-MLV RT comprising mutations D200N, T330P, L603W, T306K, and W313F, as well as an N-terminal NLS sequence (19 amino acids) and an amino acid linker (33 amino acids) that joins the C-terminus of the Cas9 nickase domain to the N-terminus of the RT domain. The PE2 fusion protein has the following structure: [NLS]-[Cas9(H840A)]-[linker]-[MMLV_RT(D200N)(T330P)(L603W)(T306K)(W313F)]. The amino acid sequence of PE2 is as follows:

| | |
|---|---|
| PE2 FUSION | MKRTADGSEFESPKKKRKVDKKYSIGLDIGTNSVGWAVITDEYKVPS |
| PROTEIN | KKFKVLGNTDRHSIKKNLIGALLFDSGETAEATRLKRTARRRYTRR |
| CAS9(H840A)- | KNRICYLQEIFSNEMAKVDDSFFHRLEESFLVEEDKKHERHPIFGNI |
| MMLV_RT | VDEVAYHEKYPTIYHLRKKLVDSTDKADLRLIYLALAHMIKFRGHF |
| D200N | LIEGDLNPDNSDVDKLFIQLVQTYNQLFEENPINASGVDAKAILSAR |
| T330P | LSKSRRLENLIAQLPGEKKNGLFGNLIALSLGLTPNFKSNFDLAEDA |
| L603W | KLQLSKDTYDDDLDNLLAQIGDQYADLFLAAKNLSDAILLSDILRV |
| T306K | NTEITKAPLSASMIKRYDEHHQDLTLLKALVRQQLPEKYKEIFFDQ |
| W313F | SKNGYAGYIDGGASQEEFYKFIKPILEKMDGTEELLVKLNREDLLR |
| | KQRTFDNGSIPHQIHLGELHAILRRQEDFYPFLKDNREKIEKILTFR |
| | IPYYVGPLARGNSRFAWMTRKSEETITPWNFEEVVDKGASAQSFIE |
| | RMTNFDKNLPNEKVLPKHSLLYEYFTVYNELTKVKYVTEGMRKPA |
| | FLSGEQKKAIVDLLFKTNRKVTVKQLKEDYFKKIECFDSVEISGVE |
| | DRFNASLGTYHDLLKIIKDKDFLDNEENEDILEDIVLTLTLFEDREM |
| | IEERLKTYAHLFDDKVMKQLKRRRYTGWGRLSRKLINGIRDKQSG |
| | KTILDFLKSDGFANRNFMQLIHDDSLTFKEDIQKAQVSGQGDSLHE |
| | HIANLAGSPAIKKGILQTVKVVDELVKVMGRHKPENIVIEMARENQ |
| | TTQKGQKNSRERMKRIEEGIKELGSQILKEHPVENTQLQNEKLYL |
| | YYLQNGRDMYVDQELDINRLSDYDVDAIVPQSFLKDDSIDNKVLTR |
| | SDKNRGKSDNVPSEEVVKKMKNYWRQLLNAKLITQRKFDNLTKA |
| | ERGGLSELDKAGFIKRQLVETRQITKHVAQILDSRMNTKYDENDK |
| | LIREVKVITLKSKLVSDFRKDFQFYKVREINNYHHAHDAYLNAVVG |
| | TALIKKYPKLESEFVYGDYKVYDVRKMIAKSEQEIGKATAKYFFYS |
| | NIMNFFKTEITLANGEIRKRPLIETNGETGEIVWDKGRDFATVRKV |
| | LSMPQVNIVKKTEVQTGGFSKESILPKRNSDKLIARKKDWDPKKY |
| | GGFDSPTVAYSVLVVAKVEKGKSKKLKSVKELLGITIMERSSFEKNP |
| | IDFLEAKGYKEVKKDLIIKLPKYSLFELENGRKRMLASAGELQKG |
| | NELALPSKYVNFLYLASHYEKLKGSPEDNEQKQLFVEQHKHYLDE |
| | IIEQISEFSKRVILADANLDKVLSAYNKHRDKPIREQAENIIHLFTLT |
| | NLGAPAAFKYFDTTIDRKRYTSTKEVLDATLIHQSITGLYETRIDLS |
| | QLGGDSGGSSGGSSGSETPGTSESATPESSGGSSGGSSTLNIEDEYRLH |
| | ETSKEPDVSLGSTWLSDFPQAWAETGGMGLAVRQAPLIIPLKATSTPVSIKQ |
| | YPMSQEARLGIKPHIQRLLDQGILVPCQSPWNTPLLPVKKPGTNDYRPVQD |
| | LREVNKRVEDIHPTVPNPYNLLSGLPPSHQWYTVLDLKDAFFCLRLHPTSQ |
| | PLFAFEWRDPEMGISGQLTWTRLPQGFKNSPTLFNEALHRDLADFRIQHP |
| | DLILLQYVDDLLLAATSELDCQQGTRALLQTLGNLGYRASAKKAQICQKQV |
| | KYLGYLLKEGQRWLTEARKETVMGQPTPKTPRQLREFLGKAGFCRLFIPG |
| | FAEMAAPLYPLTKPGTLFNWGPDQQKAYQEIKQALLTAPALGLPDLTKPFE |
| | LFVDEKQGYAKGVLTQKLGPWRRPVAYLSKKLDPVAAGWPPCLRMVAAIAV |
| | LTKDAGKLTMGQPLVILAPHAVEALVKQPPDRWLSNARMTHYQALLLDTD |
| | RVQFGPVVALNPATLLPLPEEGLQHNCLDILAEAHGTRPDLTDQPLPDADH |
| | TWYTDGSSLLQEGQRKAGAAVTTETEVIWAKALPAGTSAQRAELIALTQALK |
| | MAEGKKLNVYTDSRYAFATAHIHGEIYRRRGWLTSEGKEIKNKDEILALLKA |
| | LFLPKRLSIIHCPGHQKGHSAEARGNRMADQAARKAAITETPDTSTLLIENS |
| | SPSGGSKRTADGSEFEPKKKRKV (SEQ ID NO: 134) |
| | KEY: |
| | NUCLEAR LOCALIZATION SEQUENCE (NLS) TOP: (SEQ ID NO: 124), |
| | BOTTOM: (SEQ ID NO: 133) |
| | CAS9(H840A) (SEQ ID NO: 137) |
| | 33-AMINO ACID LINKER (SEQ ID NO: 127) |
| | M-MLV REVERSE TRANSCRIPTASE (SEQ ID NO: 139) |
| PE2-N- | MKRTADGSEFESPKKKRKV (SEQ ID NO: 124) |
| TERMINAL | |
| NLS | |
| PE2-CAS9 | DKKYSIGLDIGTNSVGWAVITDEYKVPSKKFKVLGNTDRHSIKKNLIGA |
| (H840A) | LLFDSGETAEATRLKRTARRRYTRRKNRICYLQEIFSNEMAKVDDSFFH |
| (MET | RLEESFLVEEDKKHERHPIFGNIVDEVAYHEKYPTIYHLRKKLVDSTDK |
| MINUS) | ADLRLIYLALAHMIKFRGHFLIEGDLNPDNSDVDKLFIQLVQTYNQLFE |
| | ENPINASGVDAKAILSARLSKSRRLENLIAQLPGEKKNGLFGNLIALSLG |
| | LTPNFKSNFDLAEDAKLQLSKDTYDDDLDNLLAQIGDQYADLFLAAKN |
| | LSDAILLSDILRVNTEITKAPLSASMIKRYDEHHQDLTLLKALVRQQLPE |
| | KYKEIFFDQSKNGYAGYIDGGASQEEFYKFIKPILEKMDGTEELLVKLN |
| | REDLLRKQRTFDNGSIPHQIHLGELHAILRRQEDFYPFLKDNREKIEKIL |
| | TFRIPYYVGPLARGNSRFAWMTRKSEETITPWNFEEVVDKGASAQSFIE |
| | RMTNFDKNLPNEKVLPKHSLLYEYFTVYNELTKVKYVTEGMRKPAFLS |
| | GEQKKAIVDLLFKTNRKVTVKQLKEDYFKKIECFDSVEISGVEDRFNA |
| | SLGTYHDLLKIIKDKDFLDNEENEDILEDIVLTLTLFEDREMIEERLKTY |
| | AHLFDDKVMKQLKRRRYTGWGRLSRKLINGIRDKQSGKTILDFLKSD |
| | GFANRNFMQLIHDDSLTFKEDIQKAQVSGQGDSLHEHIANLAGSPAIKK |
| | GILQTVKVVDELVKVMGRHKPENIVIEMARENQTTQKGQKNSRERMK |
| | RIEEGIKELGSQILKEHPVENTQLQNEKLYLYYLQNGRDMYVDQELDIN |
| | RLSDYDVDAIVPQSFLKDDSIDNKVLTRSDKNRGKSDNVPSEEVVKKM |
| | KNYWRQLLNAKLITQRKFDNLTKAERGGLSELDKAGFIKRQLVETRQI |
| | TKHVAQILDSRMNTKYDENDKLIREVKVITLKSKLVSDFRKDFQFYKV |
| | REINNYHHAHDAYLNAVVGTALIKKYPKLESEFVYGDYKVYDVRKMI |
| | AKSEQEIGKATAKYFFYSNIMNFFKTEITLANGEIRKRPLIETNGETGEIV |
| | WDKGRDFATVRKVLSMPQVNIVKKTEVQTGGFSKESILPKRNSDKLIA |
| | RKKDWDPKKYGGFDSPTVAYSVLVVAKVEKGKSKKLKSVKELLGITIM |
| | ERSSFEKNPIDFLEAKGYKEVKKDLIIKLPKYSLFELENGRKRMLASAG |
| | ELQKGNELALPSKYVNFLYLASHYEKLKGSPEDNEQKQLFVEQHKHY |
| | LDEIIEQISEFSKRVILADANLDKVLSAYNKHRDKPIREQAENIIHLFTLT |
| | NLGAPAAFKYFDTTIDRKRYTSTKEVLDATLIHQSITGLYETRIDLSQLG |
| | GD (SEQ ID NO: 141) |
| PE2- | SGGSSGGSSGSETPGTSESATPESSGGSSGGSS (SEQ ID NO: 127) |
| LINKER | |
| BETWEEN | |
| CAS9 | |
| DOMAIN | |
| AND RT | |
| DOMAIN (33 | |
| AMINO | |
| ACIDS) | |
| PE2- | TLNIEDEYRLHETSKEPDVSLGSTWLSDFPQAWAETGGMGLAVRQAPL |
| MMLV_RT | IIPLKATSTPVSIKQYPMSQEARLGIKPHIQRLLDQGILVPCQSPWNTPLL |
| D200N | PVKKPGTNDYRPVQDLREVNKRVEDIHPTVPNPYNLLSGLPPSHQWYT |
| T330P | VLDLKDAFFCLRLHPTSQPLFAFEWRDPEMGISGQLTWTRLPQGFKNSP |
| L603W | TLFNEALHRDLADFRIQHPDLILLQYVDDLLLAATSELDCQQGTRALLQ |
| T306K | TLGNLGYRASAKKAQICQKQVKYLGYLLKEGQRWLTEARKETVMGQ |
| W313F | PTPKTPRQLREFLGKAGFCRLFIPGFAEMAAPLYPLTKPGTLFNWGPDQ |
| | QKAYQEIKQALLTAPALGLPDLTKPFELFVDEKQGYAKGVLTQKLGPW |
| | RRPVAYLSKKLDPVAAGWPPCLRMVAAIAVLTKDAGKLTMGQPLVILA |
| | PHAVEALVKQPPDRWLSNARMTHYQALLLDTDRVQFGPVVALNPATLL |
| | PLPEEGLQHNCLDILAEAHGTRPDLTDQPLPDADHTWYTDGSSLLQEG |
| | QRKAGAAVTTETEVIWAKALPAGTSAQRAELIALTQALKMAEGKKLN |
| | VYTDSRYAFATAHIHGEIYRRRGWLTSEGKEIKNKDEILALLKALFLPKR |
| | LSIIHCPGHQKGHSAEARGNRMADQAARKAAITETPDTSTLLIENSSP |
| | (SEQ ID NO: 143) |
| PE2-C- | SGGSKRTADGSEFEPKKKRKV (SEQ ID NO: 133) |
| TERMINAL | |
| NLS | |

[0542] In still other embodiments, the prime editor fusion protein may have the following amino acid sequences:

| | |
|---|---|
| PE FUSION | MKRTADGSEFESPKKKRKVTLNIEDEYRLHETSKEPDVSLGSTWLSDFPQ |
| PROTEIN | AWAETGGMGLAVRQAPLIIPLKATSTPVSIKQYPMSQEARLGIKPHIQRLLD |
| MMLV_RT(WT)- | QGILVPCQSPWNTPLLPVKKPGTNDYRPVQDLREVNKRVEDIHPTVPNPYN |
| 32AA- | LLSGLPPSHQWYTVLDLKDAFFCLRLHPTSQPLFAFEWRDPEMGISGQLT |
| CAS9(H840A) | WTRLPQGFKNSPTLFDEALHRDLADFRIQHPDLILLQYVDDLLLAATSELD |
| | CQQGTRALLQTLGNLGYRASAKKAQICQKQVKYLGYLLKEGQRWLTEARK |
| | ETVMGQPTPKTPRQLREFLGTAGFCRLWIPGFAEMAAPLYPLTKTGTLFNW |
| | GPDQQKAYQEIKQALLTAPALGLPDLTKPFELFVDEKQGYAKGVLTQKLGP |
| | WRRPVAYLSKKLDPVAAGWPPCLRMVAAIAVLTKDAGKLTMGQPLVILAPH |
| | AVEALVKQPPDRWLSNARMTHYQALLLDTDRVQFGPVVALNPATLLPLPEE |
| | GLQHNCLDILAEAHGTRPDLTDQPLPDADHTWYTDGSSLLQEGQRKAGAA |
| | VTTETEVIWAKALPAGTSAQRAELIALTQALKMAEGKKLNVYTDSRYAFATAH |
| | IHGEIYRRRGLLTSEGKEIKNKDEILALLKALFLPKRLSIIHCPGHQKGHSAE |
| | ARGNRMADQAARKAAITETPDTSTLLIENSSPSGGSSGGSSGSETPGTSES |
| | ATPESSGGSSGGSSDKKYSIGLDIGTNSVGWAVITDEYKVPSKKFKV |
| | LGNTDRHSIKKNLIGALLFDSGETAEATRLKRTARRRYTRRKNRIC |
| | YLQEIFSNEMAKVDDSFFHRLEESFLVEEDKKHERHPIFGNIVDEVA |
| | YHEKYPTIYHLRKKLVDSTDKADLRLIYLALAHMIKFRGHFLIEGD |
| | LNPDNSDVDKLFIQLVQTYNQLFEENPINASGVDAKAILSARLSKSR |
| | RLENLIAQLPGEKKNGLFGNLIALSLGLTPNFKSNFDLAEDAKLQL |
| | SKDTYDDDLDNLLAQIGDQYADLFLAAKNLSDAILLSDILRVNTEIT |
| | KAPLSASMIKRYDEHHQDLTLLKALVRQQLPEKYKEIFFDQSKNG |
| | YAGYIDGGASQEEFYKFIKPILEKMDGTEELLVKLNREDLLRKQRT |
| | FDNGSIPHQIHLGELHAILRRQEDFYPFLKDNREKIEKILTFRIPYYV |
| | GPLARGNSRFAWMTRKSEETITPWNFEEVVDKGASAQSFIERMTN |
| | FDKNLPNEKVLPKHSLLYEYFTVYNELTKVKYVTEGMRKPAFLSG |
| | EQKKAIVDLLFKTNRKVTVKQLKEDYFKKIECFDSVEISGVEDRFN |
| | ASLGTYHDLLKIIKDKDFLDNEENEDILEDIVLTLTLFEDREMIEER |
| | LKTYAHLFDDKVMKQLKRRRYTGWGRLSRKLINGIRDKQSGKTIL |
| | DFLKSDGFANRNFMQLIHDDSLTFKEDIQKAQVSGQGDSLHEHIAN |
| | LAGSPAIKKGILQTVKVVDELVKVMGRHKPENIVIEMARENQTTQ |
| | KGQKNSRERMKRIEEGIKELGSQILKEHPVENTQLQNEKLYLYYL |
| | QNGRDMYVDQELDINRLSDYDVDAIVPQSFLKDDSIDNKVLTRSDK |
| | NRGKSDNVPSEEVVKKMKNYWRQLLNAKLITQRKFDNLTKAERG |
| | GLSELDKAGFIKRQLVETRQITKHVAQILDSRMNTKYDENDKLIRE |
| | VKVITLKSKLVSDFRKDFQFYKVREINNYHHAHDAYLNAVVGTALI |
| | KKYPKLESEFVYGDYKVYDVRKMIAKSEQEIGKATAKYFFYSNIM |
| | NFFKTEITLANGEIRKRPLIETNGETGEIVWDKGRDFATVRKVLSM |
| | PQVNIVKKTEVQTGGFSKESILPKRNSDKLIARKKDWDPKKYGGF |
| | DSPTVAYSVLVVAKVEKGKSKKLKSVKELLGITIMERSSFEKNPIDF |
| | LEAKGYKEVKKDLIIKLPKYSLFELENGRKRMLASAGELQKGNEL |
| | ALPSKYVNFLYLASHYEKLKGSPEDNEQKQLFVEQHKHYLDEIIEQ |
| | ISEFSKRVILADANLDKVLSAYNKHRDKPIREQAENIIHLFTLTNLG |
| | APAAFKYFDTTIDRKRYTSTKEVLDATLIHQSITGLYETRIDLSQLG |
| | GDSGGSKRTADGSEFEPKKKRKV (SEQ ID NO: 145) |
| | KEY: |
| | NUCLEAR LOCALIZATION SEQUENCE (NLS) TOP: (SEQ ID NO: 124), |
| | BOTTOM: (SEQ ID NO: 133) |
| | CAS9(H840A) (SEQ ID NO: 147) |
| | 33-AMINO ACID LINKER (SEQ ID NO: 127) |
| | M-MLV REVERSE TRANSCRIPTASE (SEQ ID NO: 149) |
| PE FUSION | MKRTADGSEFESPKKKRKVTLNIEDEYRLHETSKEPDVSLGSTWLSDFPQ |
| PROTEIN | AWAETGGMGLAVRQAPLIIPLKATSTPVSIKQYPMSQEARLGIKPHIQRLLD |
| MMLV_RT(WT)- | QGILVPCQSPWNTPLLPVKKPGTNDYRPVQDLREVNKRVEDIHPTVPNPYN |
| 60AA- | LLSGLPPSHQWYTVLDLKDAFFCLRLHPTSQPLFAFEWRDPEMGISGQLT |
| CAS9(H840A) | WTRLPQGFKNSPTLFDEALHRDLADFRIQHPDLILLQYVDDLLLAATSELD |
| | CQQGTRALLQTLGNLGYRASAKKAQICQKQVKYLGYLLKEGQRWLTEARK |
| | ETVMGQPTPKTPRQLREFLGTAGFCRLWIPGFAEMAAPLYPLTKTGTLFNW |
| | GPDQQKAYQEIKQALLTAPALGLPDLTKPFELFVDEKQGYAKGVLTQKLGP |
| | WRRPVAYLSKKLDPVAAGWPPCLRMVAAIAVLTKDAGKLTMGQPLVILAPH |
| | AVEALVKQPPDRWLSNARMTHYQALLLDTDRVQFGPVVALNPATLLPLPEE |
| | GLQHNCLDILAEAHGTRPDLTDQPLPDADHTWYTDGSSLLQEGQRKAGAA |
| | VTTETEVIWAKALPAGTSAQRAELIALTQALKMAEGKKLNVYTDSRYAFATAH |
| | IHGEIYRRRGLLTSEGKEIKNKDEILALLKALFLPKRLSIIHCPGHQKGHSAE |
| | ARGNRMADQAARKAAITETPDTSTLLIENSSP [symbol] GGSSGGSSGSETPGTSES |
| | ATPESAGSYPYDVPDYAGSAAPAAKKKKLDGSGSGGSSGGSDKKYS |
| | IGLDIGTNSVGWAVITDEYKVPSKKFKVLGNTDRHSIKKNLIGALLF |
| | DSGETAEATRLKRTARRRYTRRKNRICYLQEIFSNEMAKVDDSFFH |
| | RLEESFLVEEDKKHERHPIFGNIVDEVAYHEKYPTIYHLRKKLVDST |
| | DKADLRLIYLALAHMIKFRGHFLIEGDLNPDNSDVDKLFIQLVQTY |
| | NQLFEENPINASGVDAKAILSARLSKSRRLENLIAQLPGEKKNGLF |
| | GNLIALSLGLTPNFKSNFDLAEDAKLQLSKDTYDDDLDNLLAQIGD |
| | QYADLFLAAKNLSDAILLSDILRVNTEITKAPLSASMIKRYDEHHQD |
| | LTLLKALVRQQLPEKYKEIFFDQSKNGYAGYIDGGASQEEFYKFIK |
| | PILEKMDGTEELLVKLNREDLLRKQRTFDNGSIPHQIHLGELHAIL |
| | RRQEDFYPFLKDNREKIEKILTFRIPYYVGPLARGNSRFAWMTRKS |
| | EETITPWNFEEVVDKGASAQSFIERMTNFDKNLPNEKVLPKHSLLY |
| | EYFTVYNELTKVKYVTEGMRKPAFLSGEQKKAIVDLLFKTNRKVT |
| | VKQLKEDYFKKIECFDSVEISGVEDRFNASLGTYHDLLKIIKDKDFL |
| | DNEENEDILEDIVLTLTLFEDREMIEERLKTYAHLFDDKVMKQLKR |
| | RRYTGWGRLSRKLINGIRDKQSGKTILDFLKSDGFANRNFMQLIHD |
| | DSLTFKEDIQKAQVSGQGDSLHEHIANLAGSPAIKKGILQTVKVVD |
| | ELVKVMGRHKPENIVIEMARENQTTQKGQKNSRERMKRIEEGIKE |
| | LGSQILKEHPVENTQLQNEKLYLYYLQNGRDMYVDQELDINRLSD |
| | YDVDAIVPQSFLKDDSIDNKVLTRSDKNRGKSDNVPSEEVVKKMKN |
| | YWRQLLNAKLITQRKFDNLTKAERGGLSELDKAGFIKRQLVETRQ |
| | ITKHVAQILDSRMNTKYDENDKLIREVKVITLKSKLVSDFRKDFQF |
| | YKVREINNYHHAHDAYLNAVVGTALIKKYPKLESEFVYGDYKVYD |
| | VRKMIAKSEQEIGKATAKYFFYSNIMNFFKTEITLANGEIRKRPLIE |
| | TNGETGEIVWDKGRDFATVRKVLSMPQVNIVKKTEVQTGGFSKES |
| | ILPKRNSDKLIARKKDWDPKKYGGFDSPTVAYSVLVVAKVEKGKSK |
| | KLKSVKELLGITIMERSSFEKNPIDFLEAKGYKEVKKDLIIKLPKYS |
| | LFELENGRKRMLASAGELQKGNELALPSKYVNFLYLASHYEKLKG |
| | SPEDNEQKQLFVEQHKHYLDEIIEQISEFSKRVILADANLDKVLSAY |
| | NKHRDKPIREQAENIIHLFTLTNLGAPAAFKYFDTTIDRKRYTSTKE |
| | VLDATLIHQSITGLYETRIDLSQLGGDSGGSKRTADGSEFEPKKKRKV |
| | (SEQ ID NO: 150) |
| | KEY: |
| | NUCLEAR LOCALIZATION SEQUENCE (NLS) TOP: (SEQ ID NO: 124), |
| | BOTTOM: (SEQ ID NO: 133) |
| | CAS9(H840A) (SEQ ID NO: 153) |
| | AMINO ACID LINKER (SEQ ID NO: 175) |
| | M-MLV REVERSE TRANSCRIPTASE (SEQ ID NO: 149) |
| PE FUSION | MKRTADGSEFESPKKKRKVDKKYSIGLDIGTNSVGWAVITDEYKVPS |
| PROTEIN | KKFKVLGNTDRHSIKKNLIGALLFDSGETAEATRLKRTARRRYTRR |
| CAS9(H840A)- | KNRICYLQEIFSNEMAKVDDSFFHRLEESFLVEEDKKHERHPIFGNI |
| FEN1- | VDEVAYHEKYPTIYHLRKKLVDSTDKADLRLIYLALAHMIKFRGHF |
| MMLV_RT | LIEGDLNPDNSDVDKLFIQLVQTYNQLFEENPINASGVDAKAILSAR |
| D200N | LSKSRRLENLIAQLPGEKKNGLFGNLIALSLGLTPNFKSNFDLAEDA |
| T330P | KLQLSKDTYDDDLDNLLAQIGDQYADLFLAAKNLSDAILLSDILRV |
| L603W | NTEITKAPLSASMIKRYDEHHQDLTLLKALVRQQLPEKYKEIFFDQ |
| T306K | SKNGYAGYIDGGASQEEFYKFIKPILEKMDGTEELLVKLNREDLLR |
| W313F | KQRTFDNGSIPHQIHLGELHAILRRQEDFYPFLKDNREKIEKILTFR |
| | IPYYVGPLARGNSRFAWMTRKSEETITPWNFEEVVDKGASAQSFIE |
| | RMTNFDKNLPNEKVLPKHSLLYEYFTVYNELTKVKYVTEGMRKPA |
| | FLSGEQKKAIVDLLFKTNRKVTVKQLKEDYFKKIECFDSVEISGVE |
| | DRFNASLGTYHDLLKIIKDKDFLDNEENEDILEDIVLTLTLFEDREM |
| | IEERLKTYAHLFDDKVMKQLKRRRYTGWGRLSRKLINGIRDKQSG |
| | KTILDFLKSDGFANRNFMQLIHDDSLTFKEDIQKAQVSGQGDSLHE |
| | HIANLAGSPAIKKGILQTVKVVDELVKVMGRHKPENIVIEMARENQ |
| | TTQKGQKNSRERMKRIEEGIKELGSQILKEHPVENTQLQNEKLYL |
| | YYLQNGRDMYVDQELDINRLSDYDVDAIVPQSFLKDDSIDNKVLTR |
| | SDKNRGKSDNVPSEEVVKKMKNYWRQLLNAKLITQRKFDNLTKA |
| | ERGGLSELDKAGFIKRQLVETRQITKHVAQILDSRMNTKYDENDK |
| | LIREVKVITLKSKLVSDFRKDFQFYKVREINNYHHAHDAYLNAVVG |
| | TALIKKYPKLESEFVYGDYKVYDVRKMIAKSEQEIGKATAKYFFYS |
| | NIMNFFKTEITLANGEIRKRPLIETNGETGEIVWDKGRDFATVRKV |
| | LSMPQVNIVKKTEVQTGGFSKESILPKRNSDKLIARKKDWDPKKY |
| | GGFDSPTVAYSVLVVAKVEKGKSKKLKSVKELLGITIMERSSFEKNP |
| | IDFLEAKGYKEVKKDLIIKLPKYSLFELENGRKRMLASAGELQKG |
| | NELALPSKYVNFLYLASHYEKLKGSPEDNEQKQLFVEQHKHYLDE |
| | IIEQISEFSKRVILADANLDKVLSAYNKHRDKPIREQAENIIHLFTLT |
| | NLGAPAAFKYFDTTIDRKRYTSTKEVLDATLIHQSITGLYETRIDLS |
| | QLGGDSGGSSGGSSGSETPGTSESATPESSGGSSGGSSGIQGLAKLIA |
| | DVAPSAIRENDIKSYFGRKVAIDASMSIYQFLIAVRQGGDVLQNEEGETT |
| | SHLMGMFYRTIRMMENGIKPVYVFDGKPPQLKSGELAKRSERRAEAE |
| | KQLQQAQAAGAEQEVEKFTKRLVKVTKQHNDECKHLLSLMGIPYLDA |
| | PSEAEASCAALVKAGKVYAAATEDMDCLTFGSPVLMRHLTASEAKKLP |
| | IQEFHLSRILQELGLNQEQFVDLCILLGSDYCESIRGIGPKRAVDLIQKHK |
| | SIEEIVRRLDPNKYPVPENWLHKEAHQLFLEPEVLDPESVELKWSEPNE |
| | EELIKFMCGEKQFSEERIRSGVKRLSKSRQGSTQGRLDDFFKVTGSLSS |
| | AKRKEPEPKGSTKKKAKTGAAGKFKRGKSGGSSGGSSGSETPGTSES |
| | ATPESSGGSSGGSSTLNIEDEYRLHETSKEPDVSLGSTWLSDFPQAWAETG |
| | GMGLAVRQAPLIIPLKATSTPVSIKQYPMSQEARLGIKPHIQRLLDQGILVPC |
| | QSPWNTPLLPVKKPGTNDYRPVQDLREVNKRVEDIHPTVPNPYNLLSGLPP |
| | SHQWYTVLDLKDAFFCLRLHPTSQPLFAFEWRDPEMGISGQLTWTRLPQG |
| | FKNSPTLFNEALHRDLADFRIQHPDLILLQYVDDLLLAATSELDCQQGTRA |
| | LLQTLGNLGYRASAKKAQICQKQVKYLGYLLKEGQRWLTEARKETVMGQP |
| | TPKTPRQLREFLGKAGFCRLFIPGFAEMAAPLYPLTKPGTLFNWGPDQQK |
| | AYQEIKQALLTAPALGLPDLTKPFELFVDEKQGYAKGVLTQKLGPWRRPVA |
| | YLSKKLDPVAAGWPPCLRMVAAIAVLTKDAGKLTMGQPLVILAPHAVEALV |
| | KQPPDRWLSNARMTHYQALLLDTDRVQFGPVVALNPATLLPLPEEGLQHN |
| | CLDILAEAHGTRPDLTDQPLPDADHTWYTDGSSLLQEGQRKAGAAVTTET |
| | EVIWAKALPAGTSAQRAELIALTQALKMAEGKKLNVYTDSRYAFATAHIHGEI |
| | YRRRGWLTSEGKEIKNKDEILALLKALFLPKRLSIIHCPGHQKGHSAEARGN |
| | RMADQAARKAAITETPDTSTLLIENSSPSGGSKRTADGSEFEPKKKRKV |
| | (SEQ ID NO: 154) |
| | KEY: |
| | NUCLEAR LOCALIZATION SEQUENCE (NLS) TOP: (SEQ ID NO: 124), |
| | BOTTOM: (SEQ ID NO: 133) |
| | CAS9(H840A) (SEQ ID NO: 157) |
| | 33-AMINO ACID LINKER 1 (SEQ ID NO: 127) |
| | M-MLV REVERSE TRANSCRIPTASE (SEQ ID NO: 159) |
| | 33-AMINO ACID LINKER 2 (SEQ ID NO: 127) |
| | FEN1 (SEQ ID NO: 161) |

[0543] In other embodiments, the prime editor fusion proteins can be based on SaCas9 or on SpCas9 nickases with altered PAM specificities, such as the following exemplary sequences:

| | |
|---|---|
| SACAS9-M-MLV | MKRTADGSEFESPKKKRKVGKRNYILGLDIGITSVGYGIIDYETR |
| RT PRIME EDITOR | DVIDAGVRLFKEANVENNEGRRSKRGARRLKRRRRHRIQRVKK |
| | LLFDYNLLTDHSELSGINPYEARVKGLSQKLSEEEFSAALLHLA |
| | KRRGVHNVNEVEEDTGNELSTKEQISRNSKALEEKYVAELQLE |
| | RLKKDGEVRGSINRFKTSDYVKEAKQLLKVQKAYHQLDQSFID |
| | TYIDLLETRRTYYEGPGEGSPFGWKDIKEWYEMLMGHCTYFPE |
| | ELRSVKYAYNADLYNALNDLNNLVITRDENEKLEYYEKFQIIEN |
| | VFKQKKKPTLKQIAKEILVNEEDIKGYRVTSTGKPEFTNLKVYH |
| | DIKDITARKEIIENAELLDQIAKILTIYQSSEDIQEELTNLNSELTQE |
| | EIEQISNLKGYTGTHNLSLKAINLILDELWHTNDNQIAIFNRLKL |
| | VPKKVDLSQQKEIPTTLVDDFILSPVVKRSFIQSIKVINAIIKKYG |
| | LPNDIIIELAREKNSKDAQKMINEMQKRNRQTNERIEEIIRTTGK |
| | ENAKYLIEKIKLHDMQEGKCLYSLEAIPLEDLLNNPFNYEVDHII |
| | PRSVSFDNSFNNKVLVKQEEASKKGNRTPFQYLSSSDSKISYETF |
| | KKHILNLAKGKGRISKTKKEYLLEERDINRFSVQKDFINRNLVD |
| | TRYATRGLMNLLRSYFRVNNLDVKVKSINGGFTSFLRRKWKFK |
| | KERNKGYKHHAEDALIIANADFIFKEWKKLDKAKKVMENQMF |
| | EEKQAESMPEIETEQEYKEIFITPHQIKHIKDFKDYKYSHRVDKK |
| | PNRELINDTLYSTRKDDKGNTLIVNNLNGLYDKDNDKLKKLIN |
| | KSPEKLLMYHHDPQTYQKLKLIMEQYGDEKNPLYKYYEETGN |
| | YLTKYSKKDNGPVIKKIKYYGNKLNAHLDITDDYPNSRNKVVK |
| | LSLKPYRFDVYLDNGVYKFVTVKNLDVIKKENYYEVNSKCYE |
| | EAKKLKKISNQAEFIASFYNNDLIKINGELYRVIGVNNDLLNRIE |
| | VNMIDITYREYLENMNDKRPPRIIKTIASKTQSIKKYSTDILGNL |
| | YEVKSKKHPQIIKKGSGGSSGGSSGSETPGTSESATPESSGGSSG |
| | GSSTLNIEDEYRLHETSKEPDVSLGSTWLSDFPQAWAETGGMGL |
| | AVRQAPLIIPLKATSTPVSIKQYPMSQEARLGIKPHIQRLLDQGIL |
| | VPCQSPWNTPLLPVKKPGTNDYRPVQDLREVNKRVEDIHPTVP |
| | NPYNLLSGLPPSHQWYTVLDLKDAFFCLRLHPTSQPLFAFEWR |
| | DPEMGISGQLTWTRLPQGFKNSPTLFDEALHRDLADFRIQHPDL |
| | ILLQYVDDLLLAATSELDCQQGTRALLQTLGNLGYRASAKKAQ |
| | ICQKQVKYLGYLLKEGQRWLTEARKETVMGQPTPKTPRQLREF |
| | LGTAGFCRLWIPGFAEMAAPLYPLTKTGTLFNWGPDQQKAYQEI |
| | KQALLTAPALGLPDLTKPFELFVDEKQGYAKGVLTQKLGPWRR |
| | PVAYLSKKLDPVAAGWPPCLRMVAAIAVLTKDAGKLTMGQPLVI |
| | LAPHAVEALVKQPPDRWLSNARMTHYQALLLDTDRVQFGPVV |
| | ALNPATLLPLPEEGLQHNCLDILAEAHGTRPDLTDQPLPDADHT |
| | WYTDGSSLLQEGQRKAGAAVTTETEVIWAKALPAGTSAQRAEL |
| | IALTQALKMAEGKKLNVYTDSRYAFATAHIHGEIYRRRGLLTSE |
| | GKEIKNKDEILALLKALFLPKRLSIIHCPGHQKGHSAEARGNRM |
| | ADQAARKAAITETPDTSTLLIENSSPSGGSKRTADGSEFEPKKKR |
| | KV (SEQ ID NO: 162) |
| SPCAS9(H840A)- | MKRTADGSEFESPKKKRKVDKKYSIGLDIGTNSVGWAVITDEY |
| VRQR-MALONEY | KVPSKKFKVLGNTDRHSIKKNLIGALLFDSGETAEATRLKRTAR |
| MURINE | RRYTRRKNRICYLQEIFSNEMAKVDDSFFHRLEESFLVEEDKKH |
| LEUKEMIA VIRUS | ERHPIFGNIVDEVAYHEKYPTIYHLRKKLVDSTDKADLRLIYLAL |
| REVERSE | AHMIKFRGHFLIEGDLNPDNSDVDKLFIQLVQTYNQLFEENPIN |
| TRANSCRIPTASE | ASGVDAKAILSARLSKSRRLENLIAQLPGEKKNGLFGNLIALSL |
| PRIME EDITOR | GLTPNFKSNFDLAEDAKLQLSKDTYDDDLDNLLAQIGDQYADL |
| | FLAAKNLSDAILLSDILRVNTEITKAPLSASMIKRYDEHHQDLTL |
| | LKALVRQQLPEKYKEIFFDQSKNGYAGYIDGGASQEEFYKFIKPI |
| | LEKMDGTEELLVKLNREDLLRKQRTFDNGSIPHQIHLGELHAIL |
| | RRQEDFYPFLKDNREKIEKILTFRIPYYVGPLARGNSRFAWMTR |
| | KSEETITPWNFEEVVDKGASAQSFIERMTNFDKNLPNEKVLPKH |
| | SLLYEYFTVYNELTKVKYVTEGMRKPAFLSGEQKKAIVDLLFKT |
| | NRKVTVKQLKEDYFKKIECFDSVEISGVEDRFNASLGTYHDLL |
| | KIIKDKDFLDNEENEDILEDIVLTLTLFEDREMIEERLKTYAHLFD |
| | DKVMKQLKRRRYTGWGRLSRKLINGIRDKQSGKTILDFLKSDG |
| | FANRNFMQLIHDDSLTFKEDIQKAQVSGQGDSLHEHIANLAGSP |
| | AIKKGILQTVKVVDELVKVMGRHKPENIVIEMARENQTTQKGQ |
| | KNSRERMKRIEEGIKELGSQILKEHPVENTQLQNEKLYLYYLQN |
| | GRDMYVDQELDINRLSDYDVDAIVPQSFLKDDSIDNKVLTRSD |
| | KNRGKSDNVPSEEVVKKMKNYWRQLLNAKLITQRKFDNLTKA |
| | ERGGLSELDKAGFIKRQLVETRQITKHVAQILDSRMNTKYDEND |
| | KLIREVKVITLKSKLVSDFRKDFQFYKVREINNYHHAHDAYLNA |
| | VVGTALIKKYPKLESEFVYGDYKVYDVRKMIAKSEQEIGKATA |
| | KYFFYSNIMNFFKTEITLANGEIRKRPLIETNGETGEIVWDKGRD |
| | FATVRKVLSMPQVNIVKKTEVQTGGFSKESILPKRNSDKLIARK |
| | KDWDPKKYGGFVSPTVAYSVLVVAKVEKGKSKKLKSVKELLGI |
| | TIMERSSFEKNPIDFLEAKGYKEVKKDLIIKLPKYSLFELENGRK |
| | RMLASARELQKGNELALPSKYVNFLYLASHYEKLKGSPEDNEQ |
| | KQLFVEQHKHYLDEIIEQISEFSKRVILADANLDKVLSAYNKHR |
| | DKPIREQAENIIHLFTLTNLGAPAAFKYFDTTIDRKQYRSTKEVL |
| | DATLIHQSITGLYETRIDLSQLGGDSGGSSGGSSGSETPGTSESAT |
| | PESSGGSSGGSSTLNIEDEYRLHETSKEPDVSLGSTWLSDFPQA |
| | WAETGGMGLAVRQAPLIIPLKATSTPVSIKQYPMSQEARLGIKP |
| | HIQRLLDQGILVPCQSPWNTPLLPVKKPGTNDYRPVQDLREVN |
| | KRVEDIHPTVPNPYNLLSGLPPSHQWYTVLDLKDAFFCLRLHPT |
| | SQPLFAFEWRDPEMGISGQLTWTRLPQGFKNSPTLFNEALHRDL |
| | ADFRIQHPDLILLQYVDDLLLAATSELDCQQGTRALLQTLGNLG |
| | YRASAKKAQICQKQVKYLGYLLKEGQRWLTEARKETVMGQPT |
| | PKTPRQLREFLGKAGFCRLFIPGFAEMAAPLYPLTKPGTLFNWG |
| | PDQQKAYQEIKQALLTAPALGLPDLTKPFELFVDEKQGYAKGVL |
| | TQKLGPWRRPVAYLSKKLDPVAAGWPPCLRMVAAIAVLTKDAG |
| | KLTMGQPLVILAPHAVEALVKQPPDRWLSNARMTHYQALLLDT |
| | DRVQFGPVVALNPATLLPLPEEGLQHNCLDILAEAHGTRPDLTD |
| | QPLPDADHTWYTDGSSLLQEGQRKAGAAVTTETEVIWAKALPA |
| | GTSAQRAELIALTQALKMAEGKKLNVYTDSRYAFATAHIHGEIY |
| | RRRGWLTSEGKEIKNKDEILALLKALFLPKRLSIIHCPGHQKGHS |
| | AEARGNRMADQAARKAAITETPDTSTLLIENSSPSGGSKRTADG |
| | SEFEPKKKRKV (SEQ ID NO: 163) |
| SPCAS9(H840A)- | MKRTADGSEFESPKKKRKVDKKYSIGLDIGTNSVGWAVITDEY |
| VRER-MALONEY | KVPSKKFKVLGNTDRHSIKKNLIGALLFDSGETAEATRLKRTAR |
| MURINE | RRYTRRKNRICYLQEIFSNEMAKVDDSFFHRLEESFLVEEDKKH |
| LEUKEMIA VIRUS | ERHPIFGNIVDEVAYHEKYPTIYHLRKKLVDSTDKADLRLIYLAL |
| REVERSE | AHMIKFRGHFLIEGDLNPDNSDVDKLFIQLVQTYNQLFEENPIN |
| TRANSCRIPTASE | ASGVDAKAILSARLSKSRRLENLIAQLPGEKKNGLFGNLIALSL |
| PRIME EDITOR | GLTPNFKSNFDLAEDAKLQLSKDTYDDDLDNLLAQIGDQYADL |
| | FLAAKNLSDAILLSDILRVNTEITKAPLSASMIKRYDEHHQDLTL |
| | LKALVRQQLPEKYKEIFFDQSKNGYAGYIDGGASQEEFYKFIKPI |
| | LEKMDGTEELLVKLNREDLLRKQRTFDNGSIPHQIHLGELHAIL |
| | RRQEDFYPFLKDNREKIEKILTFRIPYYVGPLARGNSRFAWMTR |
| | KSEETITPWNFEEVVDKGASAQSFIERMTNFDKNLPNEKVLPKH |
| | SLLYEYFTVYNELTKVKYVTEGMRKPAFLSGEQKKAIVDLLFKT |
| | NRKVTVKQLKEDYFKKIECFDSVEISGVEDRFNASLGTYHDLL |
| | KIIKDKDFLDNEENEDILEDIVLTLTLFEDREMIEERLKTYAHLFD |
| | DKVMKQLKRRRYTGWGRLSRKLINGIRDKQSGKTILDFLKSDG |
| | FANRNFMQLIHDDSLTFKEDIQKAQVSGQGDSLHEHIANLAGSP |
| | AIKKGILQTVKVVDELVKVMGRHKPENIVIEMARENQTTQKGQ |
| | KNSRERMKRIEEGIKELGSQILKEHPVENTQLQNEKLYLYYLQN |
| | GRDMYVDQELDINRLSDYDVDAIVPQSFLKDDSIDNKVLTRSD |
| | KNRGKSDNVPSEEVVKKMKNYWRQLLNAKLITQRKFDNLTKA |
| | ERGGLSELDKAGFIKRQLVETRQITKHVAQILDSRMNTKYDEND |
| | KLIREVKVITLKSKLVSDFRKDFQFYKVREINNYHHAHDAYLNA |
| | VVGTALIKKYPKLESEFVYGDYKVYDVRKMIAKSEQEIGKATA |
| | KYFFYSNIMNFFKTEITLANGEIRKRPLIETNGETGEIVWDKGRD |
| | FATVRKVLSMPQVNIVKKTEVQTGGFSKESILPKRNSDKLIARK |
| | KDWDPKKYGGFVSPTVAYSVLVVAKVEKGKSKKLKSVKELLGI |
| | TIMERSSFEKNPIDFLEAKGYKEVKKDLIIKLPKYSLFELENGRK |
| | RMLASARELQKGNELALPSKYVNFLYLASHYEKLKGSPEDNEQ |
| | KQLFVEQHKHYLDEIIEQISEFSKRVILADANLDKVLSAYNKHR |
| | DKPIREQAENIIHLFTLTNLGAPAAFKYFDTTIDRKEYRSTKEVL |
| | DATLIHQSITGLYETRIDLSQLGGDSGGSSGGSSGSETPGTSESAT |
| | PESSGGSSGGSSTLNIEDEYRLHETSKEPDVSLGSTWLSDFPQA |
| | WAETGGMGLAVRQAPLIIPLKATSTPVSIKQYPMSQEARLGIKP |
| | HIQRLLDQGILVPCQSPWNTPLLPVKKPGTNDYRPVQDLREVN |
| | KRVEDIHPTVPNPYNLLSGLPPSHQWYTVLDLKDAFFCLRLHPT |
| | SQPLFAFEWRDPEMGISGQLTWTRLPQGFKNSPTLFNEALHRDL |
| | ADFRIQHPDLILLQYVDDLLLAATSELDCQQGTRALLQTLGNLG |
| | YRASAKKAQICQKQVKYLGYLLKEGQRWLTEARKETVMGQPT |
| | PKTPRQLREFLGKAGFCRLFIPGFAEMAAPLYPLTKPGTLFNWG |
| | PDQQKAYQEIKQALLTAPALGLPDLTKPFELFVDEKQGYAKGVL |
| | TQKLGPWRRPVAYLSKKLDPVAAGWPPCLRMVAAIAVLTKDAG |
| | KLTMGQPLVILAPHAVEALVKQPPDRWLSNARMTHYQALLLDT |
| | DRVQFGPVVALNPATLLPLPEEGLQHNCLDILAEAHGTRPDLTD |
| | QPLPDADHTWYTDGSSLLQEGQRKAGAAVTTETEVIWAKALPA |
| | GTSAQRAELIALTQALKMAEGKKLNVYTDSRYAFATAHIHGEIY |
| | RRRGWLTSEGKEIKNKDEILALLKALFLPKRLSIIHCPGHQKGHS |
| | AEARGNRMADQAARKAAITETPDTSTLLIENSSPSGGSKRTADG |
| | SEFEPKKKRKV (SEQ ID NO: 164) |

[0544] In yet other embodiments, the prime editor fusion proteins contemplated herein may include a Cas9 nickase (e.g., Cas9 (H840A)) fused to a truncated version of M-MLV reverse transcriptase. In this embodiment, the reverse transcriptase also contains 4 mutations (D200N, T306K, W313F, T330P; noting that the L603W mutation present in PE2 is no longer present due to the truncation). The DNA sequence encoding this truncated editor is 522 bp smaller than PE2, and therefore makes its potentially useful for applications where delivery of the DNA sequence is challenging due to its size (i.e. adeno-associated virus and lentivirus delivery). This embodiment is referred to as Cas9(H840A)-MMLV-RT(trunc) or “PE2-short” or “PE2-trunc” and has the following amino acid sequence:

| CAS9(H840A)- | MKRTADGSEFESPKKKRKVDKKYSIGLDIGTNSVGWAVITDE |
|---|---|
| MMLV- | YKVPSKKFKVLGNTDRHSIKKNLIGALLFDSGETAEATRLK |
| RT(TRUNC) OR | RTARRRYTRRKNRICYLQEIFSNEMAKVDDSFFHRLEESFLV |
| PE2-SHORT | EEDKKHERHPIFGNIVDEVAYHEKYPTIYHLRKKLVDSTDK |
| | ADLRLIYLALAHMIKFRGHFLIEGDLNPDNSDVDKLFIQLVQ |
| | TYNQLFEENPINASGVDAKAILSARLSKSRRLENLIAQLPGE |
| | KKNGLFGNLIALSLGLTPNFKSNFDLAEDAKLQLSKDTYDD |
| | DLDNLLAQIGDQYADLFLAAKNLSDAILLSDILRVNTEITKA |
| | PLSASMIKRYDEHHQDLTLLKALVRQQLPEKYKEIFFDQSK |
| | NGYAGYIDGGASQEEFYKFIKPILEKMDGTEELLVKLNRED |
| | LLRKQRTFDNGSIPHQIHLGELHAILRRQEDFYPFLKDNREK |
| | IEKILTFRIPYYVGPLARGNSRFAWMTRKSEETITPWNFEEV |
| | VDKGASAQSFIERMTNFDKNLPNEKVLPKHSLLYEYFTVYN |
| | ELTKVKYVTEGMRKPAFLSGEQKKAIVDLLFKTNRKVTVK |
| | QLKEDYFKKIECFDSVEISGVEDRFNASLGTYHDLLKIIKDK |
| | DFLDNEENEDILEDIVLTLTLFEDREMIEERLKTYAHLFDDK |
| | VMKQLKRRRYTGWGRLSRKLINGIRDKQSGKTILDFLKSD |
| | GFANRNFMQLIHDDSLTFKEDIQKAQVSGQGDSLHEHIANL |
| | AGSPAIKKGILQTVKVVDELVKVMGRHKPENIVIEMARENQ |
| | TTQKGQKNSRERMKRIEEGIKELGSQILKEHPVENTQLQNE |
| | KLYLYYLQNGRDMYVDQELDINRLSDYDVDAIVPQSFLKDD |
| | SIDNKVLTRSDKNRGKSDNVPSEEVVKKMKNYWRQLLNAK |
| | LITQRKFDNLTKAERGGLSELDKAGFIKRQLVETRQITKHV |
| | AQILDSRMNTKYDENDKLIREVKVITLKSKLVSDFRKDFQF |
| | YKVREINNYHHAHDAYLNAVVGTALIKKYPKLESEFVYGDY |
| | KVYDVRKMIAKSEQEIGKATAKYFFYSNIMNFFKTEITLAN |
| | GEIRKRPLIETNGETGEIVWDKGRDFATVRKVLSMPQVNIV |
| | KKTEVQTGGFSKESILPKRNSDKLIARKKDWDPKKYGGFDS |
| | PTVAYSVLVVAKVEKGKSKKLKSVKELLGITIMERSSFEKN |
| | PIDFLEAKGYKEVKKDLIIKLPKYSLFELENGRKRMLASAG |
| | ELQKGNELALPSKYVNFLYLASHYEKLKGSPEDNEQKQLFV |
| | EQHKHYLDEIIEQISEFSKRVILADANLDKVLSAYNKHRDKP |
| | IREQAENIIHLFTLTNLGAPAAFKYFDTTIDRKRYTSTKEVL |
| | DATLIHQSITGLYETRIDLSQLGGDSGGSSGGSSGSETPGTSE |
| | SATPESSGGSSGGSSTLNIEDEYRLHETSKEPDVSLGSTWLSDFPQ |
| | AWAETGGMGLAVRQAPLIIPLKATSTPVSIKQYPMSQEARLGIKPHI |
| | QRLLDQGILVPCQSPWNTPLLPVKKPGTNDYRPVQDLREVNKRVE |
| | DIHPTVPNPYNLLSGLPPSHQWYTVLDLKDAFFCLRLHPTSQPLFA |
| | FEWRDPEMGISGQLTWTRLPQGFKNSPTLFNEALHRDLADFRIQH |
| | PDLILLQYVDDLLLAATSELDCQQGTRALLQTLGNLGYRASAKKAQI |
| | CQKQVKYLGYLLKEGQRWLTEARKETVMGQPTPKTPRQLREFLGK |
| | AGFCRLFIPGFAEMAAPLYPLTKPGTLFNWGPDQQKAYQEIKQAL |
| | LTAPALGLPDLTKPFELFVDEKQGYAKGVLTQKLGPWRRPVAYLSK |
| | KLDPVAAGWPPCLRMVAAIAVLTKDAGKLTMGQPLVILAPHAVEA |
| | LVKQPPDRWLSNARMTHYQALLLDTDRVQFGPVVALNPATLLPLP |
| | EEGLQHNCLDNSRLINSGGSKRTADGSEFEPKKKRKV (SEQ ID |
| | NO: 765) |
| | KEY: |
| | NUCLEAR LOCALIZATION SEQUENCE (NLS) TOP: (SEQ ID NO: |
| | 124), BOTTOM: (SEQ ID NO: 133) |
| | CAS9(H840A) (SEQ ID NO: 157) |
| | 33-AMINO ACID LINKER 1 (SEQ ID NO: 127) |
| | M-MLV TRUNCATED REVERSE TRANSCRIPTASE (SEQ ID NO: |
| | 766) |

[0545] See FIG. 75, which provides a bar graph comparing the efficiency (i.e., “% of total sequencing reads with the specified eidt or indels”) of PE2, PE2-trunc, PE3, and PE3-trunc over different target sites in various cell lines. The data shows that the prime editors comprising the truncated RT variants were about as efficient as the prime editors comprising the non-truncated RT proteins.

[0546] In various embodiments, the prime editor fusion proteins contemplated herein may also include any variants of the above-disclosed sequences having an amino acid sequence that is at least about 70% identical, at least about 80% identical, at least about 90% identical, at least about 95% identical, at least about 96% identical, at least about 97% identical, at least about 98% identical, at least about 99% identical, at least about 99.5% identical, or at least about 99.9% identical to PE1, PE2, or any of the above indicated prime editor fusion sequences.

[0547] In certain embodiments, linkers may be used to link any of the peptides or peptide domains or moieties of the invention (e.g., a napDNAbp linked or fused to a reverse transcriptase).

### [5] Linkers and Other Domains

[0548] The PE fusion proteins may comprise various other domains besides the napDNAbp (e.g., Cas9 domain) and the polymerase domain (e.g., RT domain). For example, in the case where the napDNAbp is a Cas9 and the polymerase is a RT, the PE fusion proteins may comprise one or more linkers that join the Cas9 domain with the RT domain. The linkers may also join other functional domains, such as nuclear localization sequences (NLS) or a FEN1 (or other flap endonuclease) to the PE fusion proteins or a domain thereof.

[0549] In addition, in embodiments involving trans prime editing, linkers may be used to link tPERT recruitment protein to a prime editor, e.g., between the tPERt recruitment protein and the napDNAbp. See e.g., FIG. 3G for an exemplary schematic of a trans prime editor (tPE) that includes linkers to separately fuse a polymerase domain and a recruiting protein domain to a napDNAbp.

[0550] A. Linkers

[0551] As defined above, the term “linker,” as used herein, refers to a chemical group or a molecule linking two molecules or moieties, e.g., a binding domain and a cleavage domain of a nuclease. In some embodiments, a linker joins a gRNA binding domain of an RNA-programmable nuclease and the catalytic domain of a polymerase (e.g., a reverse transcriptase). In some embodiments, a linker joins a dCas9 and reverse transcriptase. Typically, the linker is positioned between, or flanked by, two groups, molecules, or other moieties and connected to each one via a covalent bond, thus connecting the two. In some embodiments, the linker is an amino acid or a plurality of amino acids (e.g., a peptide or protein). In some embodiments, the linker is an organic molecule, group, polymer, or chemical moiety. In some embodiments, the linker is 5-100 amino acids in length, for example, 5, 6, 7, 8, 9, 10, 11, 12, 13, 14, 15, 16, 17, 18, 19, 20, 21, 22, 23, 24, 25, 26, 27, 28, 29, 30, 30-35, 35-40, 40-45, 45-50, 50-60, 60-70, 70-80, 80-90, 90-100, 100-150, or 150-200 amino acids in length. Longer or shorter linkers are also contemplated.

[0552] The linker may be as simple as a covalent bond, or it may be a polymeric linker many atoms in length. In certain embodiments, the linker is a polypeptide or based on amino acids. In other embodiments, the linker is not peptide-like. In certain embodiments, the linker is a covalent bond (e.g., a carbon-carbon bond, disulfide bond, carbon-heteroatom bond, etc.). In certain embodiments, the linker is a carbon-nitrogen bond of an amide linkage. In certain embodiments, the linker is a cyclic or acyclic, substituted or unsubstituted, branched or unbranched aliphatic or heteroaliphatic linker. In certain embodiments, the linker is polymeric (e.g., polyethylene, polyethylene glycol, polyamide, polyester, etc.). In certain embodiments, the linker comprises a monomer, dimer, or polymer of aminoalkanoic acid. In certain embodiments, the linker comprises an aminoalkanoic acid (e.g., glycine, ethanoic acid, alanine, beta-alanine, 3-aminopropanoic acid, 4-aminobutanoic acid, 5-pentanoic acid, etc.). In certain embodiments, the linker comprises a monomer, dimer, or polymer of aminohexanoic acid (Ahx). In certain embodiments, the linker is based on a carbocyclic moiety (e.g., cyclopentane, cyclohexane). In other embodiments, the linker comprises a polyethylene glycol moiety (PEG). In other embodiments, the linker comprises amino acids. In certain embodiments, the linker comprises a peptide. In certain embodiments, the linker comprises an aryl or heteroaryl moiety. In certain embodiments, the linker is based on a phenyl ring. The linker may included functionalized moieties to facilitate attachment of a nucleophile (e.g., thiol, amino) from the peptide to the linker. Any electrophile may be used as part of the linker. Exemplary electrophiles include, but are not limited to, activated esters, activated amides, Michael acceptors, alkyl halides, aryl halides, acyl halides, and isothiocyanates.

[0553] In some other embodiments, the linker comprises the amino acid sequence (GGGGS)ₙ (SEQ ID NO: 165), (G)ₙ(SEQ ID NO: 166), (EAAAK)ₙ (SEQ ID NO: 167), (GGS)ₙ (SEQ ID NO: 168), (SGGS)ₙ(SEQ ID NO: 169), (XP). (SEQ ID NO: 170), or any combination thereof, wherein n is independently an integer between 1 and 30, and wherein X is any amino acid. In some embodiments, the linker comprises the amino acid sequence (GGS)N (SEQ ID NO: 176), wherein n is 1, 3, or 7. In some embodiments, the linker comprises the amino acid sequence SGSETPGTSESATPES (SEQ ID NO: 171). In some embodiments, the linker comprises the amino acid sequence SGGSSGGSSGSETPGTSESATPESSGGSSGGS (SEQ ID NO: 172). In some embodiments, the linker comprises the amino acid sequence SGGSGGSGGS (SEQ ID NO: 173). In some embodiments, the linker comprises the amino acid sequence SGGS (SEQ ID NO: 174). In other embodiments, the linker comprises the amino acid sequence

(SEQ ID NO: 175, 60AA)
SGGSSGGSSGSETPGTSESATPESAGSYPYDVPDYAGSAAPAAKKKKLDG
SGSGGSSGGS.

[0554] In certain embodiments, linkers may be used to link any of the peptides or peptide domains or moieties of the invention (e.g., a napDNAbp linked or fused to a reverse transcriptase).

[0555] As defined above, the term “linker,” as used herein, refers to a chemical group or a molecule linking two molecules or moieties, e.g., a binding domain and a cleavage domain of a nuclease. In some embodiments, a linker joins a gRNA binding domain of an RNA-programmable nuclease and the catalytic domain of a recombinase. In some embodiments, a linker joins a dCas9 and reverse transcriptase. Typically, the linker is positioned between, or flanked by, two groups, molecules, or other moieties and connected to each one via a covalent bond, thus connecting the two. In some embodiments, the linker is an amino acid or a plurality of amino acids (e.g., a peptide or protein). In some embodiments, the linker is an organic molecule, group, polymer, or chemical moiety. In some embodiments, the linker is 5-100 amino acids in length, for example, 5, 6, 7, 8, 9, 10, 11, 12, 13, 14, 15, 16, 17, 18, 19, 20, 21, 22, 23, 24, 25, 26, 27, 28, 29, 30, 30-35, 35-40, 40-45, 45-50, 50-60, 60-70, 70-80, 80-90, 90-100, 100-150, or 150-200 amino acids in length. Longer or shorter linkers are also contemplated.

[0556] The linker may be as simple as a covalent bond, or it may be a polymeric linker many atoms in length. In certain embodiments, the linker is a polypeptide or based on amino acids. In other embodiments, the linker is not peptide-like. In certain embodiments, the linker is a covalent bond (e.g., a carbon-carbon bond, disulfide bond, carbon-heteroatom bond, etc.). In certain embodiments, the linker is a carbon-nitrogen bond of an amide linkage. In certain embodiments, the linker is a cyclic or acyclic, substituted or unsubstituted, branched or unbranched aliphatic or heteroaliphatic linker. In certain embodiments, the linker is polymeric (e.g., polyethylene, polyethylene glycol, polyamide, polyester, etc.). In certain embodiments, the linker comprises a monomer, dimer, or polymer of aminoalkanoic acid. In certain embodiments, the linker comprises an aminoalkanoic acid (e.g., glycine, ethanoic acid, alanine, beta-alanine, 3-aminopropanoic acid, 4-aminobutanoic acid, 5-pentanoic acid, etc.). In certain embodiments, the linker comprises a monomer, dimer, or polymer of aminoHEXAnoic acid (Ahx). In certain embodiments, the linker is based on a carbocyclic moiety (e.g., cyclopentane, cycloHEXAne). In other embodiments, the linker comprises a polyethylene glycol moiety (PEG). In other embodiments, the linker comprises amino acids. In certain embodiments, the linker comprises a peptide. In certain embodiments, the linker comprises an aryl or heteroaryl moiety. In certain embodiments, the linker is based on a phenyl ring. The linker may included functionalized moieties to facilitate attachment of a nucleophile (e.g., thiol, amino) from the peptide to the linker. Any electrophile may be used as part of the linker. Exemplary electrophiles include, but are not limited to, activated esters, activated amides, Michael acceptors, alkyl halides, aryl halides, acyl halides, and isothiocyanates.

[0557] In some other embodiments, the linker comprises the amino acid sequence (GGGGS)n (SEQ ID NO: 165), (G)n (SEQ ID NO: 166), (EAAAK)ₙ (SEQ ID NO: 167), (GGS)ₙ (SEQ ID NO: 168), (SGGS)n (SEQ ID NO: 169), (XP)n (SEQ ID NO: 170), or any combination thereof, wherein n is independently an integer between 1 and 30, and wherein X is any amino acid. In some embodiments, the linker comprises the amino acid sequence (GGS)N(SEQ ID NO: 176), wherein n is 1, 3, or 7. In some embodiments, the linker comprises the amino acid sequence SGSETPGTSESATPES (SEQ ID NO: 171). In some embodiments, the linker comprises the amino acid sequence SGGSSGGSSGSETPGTSESATPESSGGSSGGS (SEQ ID NO: 172). In some embodiments, the linker comprises the amino acid sequence SGGSGGSGGS (SEQ ID NO: 173). In some embodiments, the linker comprises the amino acid sequence SGGS (SEQ ID NO: 174).

[0558] In particular, the following linkers can be used in various embodiments to join prime editor domains with one another:

(SEQ ID NO: 767)
GGS;
(SEQ ID NO: 768)
GGSGGS;
(SEQ ID NO: 769)
GGSGGSGGS;
(SEQ ID NO: 127)
SGGSSGGSSGSETPGTSESATPESSGGSSGGSS;
(SEQ ID NO: 171)
SGSETPGTSESATPES;
(SEQ ID NO: 175)
SGGSSGGSSGSETPGTSESATPESAGSYPYDVPDYAGSAAPAAKKKKLDG
SGSGGSSGGS.

[0559] B. Nuclear Localization Sequence (NLS)

[0560] In various embodiments, the PE fusion proteins may comprise one or more nuclear localization sequences (NLS), which help promote translocation of a protein into the cell nucleus. Such sequences are well-known in the art and can include the following examples:

| DESCRIPTION | SEQUENCE | SEQ ID NO: |
|---|---|---|
| NLS OF | PKKKRKV | SEQ ID NO: 16 |
| SV40 | | |
| LARGE T- | | |
| AG | | |
| NLS | MKRTADGSEFESPKKKRKV | SEQ ID NO: 124 |
| NLS | MDSLLMNRRKFLYQFKNVRW | SEQ ID NO: 17 |
| | AKGRRETYLC | |
| NLS OF | AVKRPAATKKAGQAKKKKLD | SEQ ID NO: 190 |
| NUCLEOP | | |
| LASMIN | | |
| NLS OF | MSRRRKANPTKLSENAKKLA | SEQ ID NO: 191 |
| EGL-13 | KEVEN | |
| NLS OF C- | PAAKRVKLD | SEQ ID NO: 192 |
| MYC | | |
| NLS OF | KLKIKRPVK | SEQ ID NO: 193 |
| TUS- | | |
| PROTEIN | | |
| NLS OF | VSRKRPRP | SEQ ID NO: 194 |
| POLYOMA | | |
| LARGE T- | | |
| AG | | |
| NLS OF | EGAPPAKRAR | SEQ ID NO: 195 |
| HEPATITIS | | |
| D VIRUS | | |
| ANTIGEN | | |
| NLS OF | PPQPKKKPLDGE | SEQ ID NO: 196 |
| MURINE | | |
| P53 | | |
| NLS OF | SGGSKRTADGSEFEPKKKRKV | SEQ ID NO: 133 |
| PE1 AND | | |
| PE2 | | |

[0561] The NLS examples above are non-limiting. The PE fusion proteins may comprise any known NLS sequence, including any of those described in Cokol et al., “Finding nuclear localization signals,” EMBO Rep., 2000, 1(5): 411-415 and Freitas et al., “Mechanisms and Signals for the Nuclear Import of Proteins,” Current Genomics, 2009, 10(8): 550-7, each of which are incorporated herein by reference.

[0562] In various embodiments, the prime editors and constructs encoding the prime editors disclosed herein further comprise one or more, preferably, at least two nuclear localization signals. In certain embodiments, the prime editors comprise at least two NLSs. In embodiments with at least two NLSs, the NLSs can be the same NLSs or they can be different NLSs. In addition, the NLSs may be expressed as part of a fusion protein with the remaining portions of the prime editors. In some embodiments, one or more of the NLSs are bipartite NLSs (“bpNLS”). In certain embodiments, the disclosed fusion proteins comprise two bipartite NLSs. In some embodiments, the disclosed fusion proteins comprise more than two bipartite NLSs.

[0563] The location of the NLS fusion can be at the N-terminus, the C-terminus, or within a sequence of a prime editor (e.g., inserted between the encoded napDNAbp component (e.g., Cas9) and a polymerase domain (e.g., a reverse transcriptase domain).

[0564] The NLSs may be any known NLS sequence in the art. The NLSs may also be any future-discovered NLSs for nuclear localization. The NLSs also may be any naturally-occurring NLS, or any non-naturally occurring NLS (e.g., an NLS with one or more desired mutations).

[0565] The term “nuclear localization sequence” or “NLS” refers to an amino acid sequence that promotes import of a protein into the cell nucleus, for example, by nuclear transport. Nuclear localization sequences are known in the art and would be apparent to the skilled artisan. For example, NLS sequences are described in Plank et al., International PCT application PCT/EP2000/011690, filed Nov. 23, 2000, published as WO/2001/038547 on May 31, 2001, the contents of which are incorporated herein by reference. In some embodiments, an NLS comprises the amino acid sequence PKKKRKV (SEQ ID NO: 16), MDSLLMNRRKFLYQFKNVRWAKGRRETYLC (SEQ ID NO: 17), KRTADGSEFESPKKKRKV (SEQ ID NO: 3864), or KRTADGSEFEPKKKRKV (SEQ ID NO: 125). In other embodiments, NLS comprises the amino acid sequences NLSKRPAAIKKAGQAKKKK (SEQ ID NO: 136), PAAKRVKLD (SEQ ID NO: 192), RQRRNELKRSF (SEQ ID NO: 3934), NQSSNFGPMKGGNFGGRSSGPYGGGGQYFAKPRNQGGY (SEQ ID NO: 3935).

[0566] In one aspect of the disclosure, a prime editor may be modified with one or more nuclear localization signals (NLS), preferably at least two NLSs. In certain embodiments, the prime editors are modified with two or more NLSs. The disclosure contemplates the use of any nuclear localization signal known in the art at the time of the disclosure, or any nuclear localization signal that is identified or otherwise made available in the state of the art after the time of the instant filing. A representative nuclear localization signal is a peptide sequence that directs the protein to the nucleus of the cell in which the sequence is expressed. A nuclear localization signal is predominantly basic, can be positioned almost anywhere in a protein's amino acid sequence, generally comprises a short sequence of four amino acids (Autieri & Agrawal, (1998) J. Biol. Chem. 273: 14731-37, incorporated herein by reference) to eight amino acids, and is typically rich in lysine and arginine residues (Magin et al., (2000) Virology 274: 11-16, incorporated herein by reference). Nuclear localization signals often comprise proline residues. A variety of nuclear localization signals have been identified and have been used to effect transport of biological molecules from the cytoplasm to the nucleus of a cell. See, e.g., Tinland et al., (1992) Proc. Natl. Acad. Sci. U.S.A. 89:7442-46; Moede et al., (1999) FEBS Lett. 461:229-34, which is incorporated by reference. Translocation is currently thought to involve nuclear pore proteins.

[0567] Most NLSs can be classified in three general groups: (i) a monopartite NLS exemplified by the SV40 large T antigen NLS (PKKKRKV (SEQ ID NO: 16)); (ii) a bipartite motif consisting of two basic domains separated by a variable number of spacer amino acids and exemplified by the Xenopus nucleoplasmin NLS (KRXXXXXXXXXXKKKL (SEQ ID NO: 3936)); and (iii) noncanonical sequences such as M9 of the hnRNP A1 protein, the influenza virus nucleoprotein NLS, and the yeast Gal4 protein NLS (Dingwall and Laskey 1991).

[0568] Nuclear localization signals appear at various points in the amino acid sequences of proteins. NLS's have been identified at the N-terminus, the C-terminus and in the central region of proteins. Thus, the disclosure provides prime editors that may be modified with one or more NLSs at the C-terminus, the N-terminus, as well as at in internal region of the prime editor. The residues of a longer sequence that do not function as component NLS residues should be selected so as not to interfere, for example tonically or sterically, with the nuclear localization signal itself. Therefore, although there are no strict limits on the composition of an NLS-comprising sequence, in practice, such a sequence can be functionally limited in length and composition.

[0569] The present disclosure contemplates any suitable means by which to modify a prime editor to include one or more NLSs. In one aspect, the prime editors may be engineered to express a prime editor protein that is translationally fused at its N-terminus or its C-terminus (or both) to one or more NLSs, i.e., to form a prime editor-NLS fusion construct. In other embodiments, the prime editor-encoding nucleotide sequence may be genetically modified to incorporate a reading frame that encodes one or more NLSs in an internal region of the encoded prime editor. In addition, the NLSs may include various amino acid linkers or spacer regions encoded between the prime editor and the N-terminally, C-terminally, or internally-attached NLS amino acid sequence, e.g, and in the central region of proteins. Thus, the present disclosure also provides for nucleotide constructs, vectors, and host cells for expressing fusion proteins that comprise a prime editor and one or more NLSs.

[0570] The prime editors described herein may also comprise nuclear localization signals which are linked to a prime editor through one or more linkers, e.g., and polymeric, amino acid, nucleic acid, polysaccharide, chemical, or nucleic acid linker element. The linkers within the contemplated scope of the disclosure are not intended to have any limitations and can be any suitable type of molecule (e.g., polymer, amino acid, polysaccharide, nucleic acid, lipid, or any synthetic chemical linker domain) and be joined to the prime editor by any suitable strategy that effectuates forming a bond (e.g., covalent linkage, hydrogen bonding) between the prime editor and the one or more NLSs.

[0571] C. Flap Endonucleases (e.g., FEN)

[0572] In various embodiments, the PE fusion proteins may comprise one or more flap endonulceases (e.g., FEN1), which refers to an enzyme that catalyzes the removal of 5′ single strand DNA flaps. These are naturally occurring enzymes that process the removal of 5′ flaps formed during cellular processes, including DNA replication. The prime editing methods herein described may utilize endogenously supplied flap endonucleases or those provided in trans to remove the 5′ flap of endogenous DNA formed at the target site during prime editing. Flap endonucleases are known in the art and can be found described in Patel et al., “Flap endonucleases pass 5′-flaps through a flexible arch using a disorder-thread-order mechanism to confer specificity for free 5′-ends,” Nucleic Acids Research, 2012, 40(10): 4507-4519 and Tsutakawa et al., “Human flap endonuclease structures, DNA double-base flipping, and a unified understanding of the FEN1 superfamily,” Cell, 2011, 145(2): 198-211 (each of which are incorporated herein by reference). An exemplary flap endonuclease is FEN1, which can be represented by the following amino acid sequence:

| Description | Sequence | SEQ ID NO: |
|---|---|---|
| FEN1 | MGIQGLAKLIADVAPSAIRENDIKSYFGRKVAIDASMSI | SEQ ID NO: |
| Wild type | YQFLIAVRQGGDVLQNEEGETTSHLMGMFYRTIRMME | 198 |
| (wt) | NGIKPVYVFDGKPPQLKSGELAKRSERRAEAEKQLQQ | |
| | AQAAGAEQEVEKFTKRLVKVTKQHNDECKHLLSLMGI | |
| | PYLDAPSEAEASCAALVKAGKVYAAATEDMDCLTFGS | |
| | PVLMRHLTASEAKKLPIQEFHLSRILQELGLNQEQFVD | |
| | LCILLGSDYCESIRGIGPKRAVDLIQKHKSIEEIVRRLDP | |
| | NKYPVPENWLHKEAHQLFLEPEVLDPESVELKWSEPN | |
| | EEELIKFMCGEKQFSEERIRSGVKRLSKSRQGSTQGRLD | |
| | DFFKVTGSLSSAKRKEPEPKGSTKKKAKTGAAGKFKR | |
| | GK | |

[0573] The flap endonucleases may also include any FEN1 variant, mutant, or other flap endonuclease ortholog, homolog, or variant. Non-limiting FEN1 variant examples are as follows:

| Description | Sequence | SEQ ID NO: |
|---|---|---|
| FEN1 | MGIQGLAKLIADVAPSAIRENDIKSYFGRKVAIDASMSI | SEQ ID NO: |
| K168R | YQFLIAVRQGGDVLQNEEGETTSHLMGMFYRTIRMME | 199 |
| (relative to | NGIKPVYVFDGKPPQLKSGELAKRSERRAEAEKQLQQ | |
| FEN1 wt) | AQAAGAEQEVEKFTKRLVKVTKQHNDECKHLLSLMGI | |
| | PYLDAPSEAEASCAALVRAGKVYAAATEDMDCLTFGS | |
| | PVLMRHLTASEAKKLPIQEFHLSRILQELGLNQEQFVD | |
| | LCILLGSDYCESIRGIGPKRAVDLIQKHKSIEEIVRRLDP | |
| | NKYPVPENWLHKEAHQLFLEPEVLDPESVELKWSEPN | |
| | EEELIKFMCGEKQFSEERIRSGVKRLSKSRQGSTQGRLD | |
| | DFFKVTGSLSSAKRKEPEPKGSTKKKAKTGAAGKFKR | |
| | GK | |
| FEN1 | MGIQGLAKLIADVAPSAIRENDIKSYFGRKVAIDASMSI | SEQ ID NO: |
| S187A | YQFLIAVRQGGDVLQNEEGETTSHLMGMFYRTIRMME | 200 |
| (relative to | NGIKPVYVFDGKPPQLKSGELAKRSERRAEAEKQLQQ | |
| FEN1 wt) | AQAAGAEQEVEKFTKRLVKVTKQHNDECKHLLSLMGI | |
| | PYLDAPSEAEASCAALVKAGKVYAAATEDMDCLTFG | |
| | APVLMRHLTASEAKKLPIQEFHLSRILQELGLNQEQFV | |
| | DLCILLGSDYCESIRGIGPKRAVDLIQKHKSIEEIVRRLD | |
| | PNKYPVPENWLHKEAHQLFLEPEVLDPESVELKWSEP | |
| | NEEELIKFMCGEKQFSEERIRSGVKRLSKSRQGSTQGRL | |
| | DDFFKVTGSLSSAKRKEPEPKGSTKKKAKTGAAGKFK | |
| | RGK | |
| FEN1 | MGIQGLAKLIADVAPSAIRENDIKSYFGRKVAIDASMSI | SEQ ID NO: |
| K354R | YQFLIAVRQGGDVLQNEEGETTSHLMGMFYRTIRMME | 201 |
| (relative to | NGIKPVYVFDGKPPQLKSGELAKRSERRAEAEKQLQQ | |
| FEN1 wt) | AQAAGAEQEVEKFTKRLVKVTKQHNDECKHLLSLMGI | |
| | PYLDAPSEAEASCAALVKAGKVYAAATEDMDCLTFGS | |
| | PVLMRHLTASEAKKLPIQEFHLSRILQELGLNQEQFVD | |
| | LCILLGSDYCESIRGIGPKRAVDLIQKHKSIEEIVRRLDP | |
| | NKYPVPENWLHKEAHQLFLEPEVLDPESVELKWSEPN | |
| | EEELIKFMCGEKQFSEERIRSGVKRLSKSRQGSTQGRLD | |
| | DFFKVTGSLSSARRKEPEPKGSTKKKAKTGAAGKFKR | |
| | GK | |
| GEN1 | MGVNDLWQILEPVKQHIPLRNLGGKTIAVDLSLWVCE | SEQ ID NO: |
| | AQTVKKMMGSVMKPHLRNLFFRISYLTQMDVKLVFV | 202 |
| | MEGEPPKLKADVISKRNQSRYGSSGKSWSQKTGRSHF | |
| | KSVLRECLHMLECLGIPWVQAAGEAEAMCAYLNAGG | |
| | HVDGCLTNDGDTFLYGAQTVYRNFTMNTKDPHVDCY | |
| | TMSSIKSKLGLDRDALVGLAILLGCDYLPKGVPGVGKE | |
| | QALKLIQILKGQSLLQRFNRWNETSCNSSPQLLVTKKL | |
| | AHCSVCSHPGSPKDHERNGCRLCKSDKYCEPHDYEYC | |
| | CPCEWHRTEHDRQLSEVENNIKKKACCCEGFPFHEVIQ | |
| | EFLLNKDKLVKVIRYQRPDLLLFQRFTLEKMEWPNHY | |
| | ACEKLLVLLTHYDMIERKLGSRNSNQLQPIRIVKTRIRN | |
| | GVHCFEIEWEKPEHYAMEDKQHGEFALLTIEEESLFEA | |
| | AYPEIVAVYQKQKLEIKGKKQKRIKPKENNLPEPDEVM | |
| | SFQSHMTLKPTCEIFHKQNSKLNSGISPDPTLPQESISAS | |
| | LNSLLLPKNTPCLNAQEQFMSSLRPLAIQQIKAVSKSLI | |
| | SESSQPNTSSHNISVIADLHLSTIDWEGTSFSNSPAIQRN | |
| | TFSHDLKSEVESELSAIPDGFENIPEQLSCESERYTANIK | |
| | KVLDEDSDGISPEEHLLSGITDLCLQDLPLKERIFTKLSY | |
| | PQDNLQPDVNLKTLSILSVKESCIANSGSDCTSHLSKDL | |
| | PGIPLQNESRDSKILKGDQLLQEDYKVNTSVPYSVSNT | |
| | VVKTCNVRPPNTALDHSRKVDMQTTRKILMKKSVCLD | |
| | RHSSDEQSAPVFGKAKYTTQRMKHSSQKHNSSHFKES | |
| | GHNKLSSPKIHIKETEQCVRSYETAENEESCFPDSTKSS | |
| | LSSLQCHKKENNSGTCLDSPLPLRQRLKLRFQST | |
| ERCC5 | MGVQGLWKLLECSGRQVSPEALEGKILAVDISIWLNQ | SEQ ID NO: |
| | ALKGVRDRHGNSIENPHLLTLFHRLCKLLFFRIRPIFVF | 203 |
| | DGDAPLLKKQTLVKRRQRKDLASSDSRKTTEKLLKTF | |
| | LKRQAIKTAFRSKRDEALPSLTQVRRENDLYVLPPLQE | |
| | EEKHSSEEEDEKEWQERMNQKQALQEEFFHNPQAIDIE | |
| | SEDFSSLPPEVKHEILTDMKEFTKRRRTLFEAMPEESDD | |
| | FSQYQLKGLLKKNYLNQHIEHVQKEMNQQHSGHIRRQ | |
| | YEDEGGFLKEVESRRVVSEDTSHYILIKGIQAKTVAEV | |
| | DSESLPSSSKMHGMSFDVKSSPCEKLKTEKEPDATPPSP | |
| | RTLLAMQAALLGSSSEEELESENRRQARGRNAPAAVD | |
| | EGSISPRTLSAIKRALDDDEDVKVCAGDDVQTGGPGAE | |
| | EMRINSSTENSDEGLKVRDGKGIPFTATLASSSVNSAEE | |
| | HVASTNEGREPTDSVPKEQMSLVHVGTEAFPISDESMI | |
| | KDRKDRLPLESAVVRHSDAPGLPNGRELTPASPTCTNS | |
| | VSKNETHAEVLEQQNELCPYESKFDSSLLSSDDETKCK | |
| | PNSASEVIGPVSLQETSSIVSVPSEAVDNVENVVSFNAK | |
| | EHENFLETIQEQQTTESAGQDLISIPKAVEPMEIDSEESE | |
| | SDGSFIEVQSVISDEELQAEFPETSKPPSEQGEEELVGTR | |
| | EGEAPAESESLLRDNSERDDVDGEPQEAEKDAEDSLHE | |
| | WQDINLEELETLESNLLAQQNSLKAQKQQQERIAATVT | |
| | GQMFLESQELLRLFGIPYIQAPMEAEAQCAILDLTDQTS | |
| | GTITDDSDIWLFGARHVYRNFFNKNKFVEYYQYVDFH | |
| | NQLGLDRNKLINLAYLLGSDYTEGIPTVGCVTAMEILN | |
| | EFPGHGLEPLLKFSEWWHEAQKNPKIRPNPHDTKVKK | |
| | KLRTLQLTPGFPNPAVAEAYLKPVVDDSKGSFLWGKP | |
| | DLDKIREFCQRYFGWNRTKTDESLFPVLKQLDAQQTQ | |
| | LRIDSFFRLAQQEKEDAKRIKSQRLNRAVTCMLRKEKE | |
| | AAASEIEAVSVAMEKEFELLDKAKRKTQKRGITNTLEE | |
| | SSSLKRKRLSDSKRKNTCGGFLGETCLSESSDGSSSEDA | |
| | ESSSLMNVQRRTAAKEPKTSASDSQNSVKEAPVKNGG | |
| | ATTSSSSDSDDDGGKEKMVLVTARSVFGKKRRKLRRA | |
| | RGRKRKT | |

[0574] In various embodiments, the prime editor fusion proteins contemplated herein may include any flap endonuclease variant of the above-disclosed sequences having an amino acid sequence that is at least about 70% identical, at least about 80% identical, at least about 90% identical, at least about 95% identical, at least about 96% identical, at least about 97% identical, at least about 98% identical, at least about 99% identical, at least about 99.5% identical, or at least about 99.9% identical to any of the above sequences.

[0575] Other endonucleases that may be utilized by the instant methods to facilitate removal of the 5′ end single strand DNA flap include, but are not limited to (1) trex 2, (2) exol endonuclease (e.g., Keijzers et al., Biosci Rep. 2015, 35(3): e00206)

### Trex 2

3′ three prime repair exonuclease 2 (TREX2) -
human
Accession No. NM_080701
(SEQ ID NO: 3865)
MSEAPRAETFVFLDLEATGLPSVEPEIAELSLFAVHRSSLENPEHDESGA
LVLPRVLDKLTLCMCPERPFTAKASEITGLSSEGLARCRKAGFDGAVVRT
LQAFLSRQAGPICLVAHNGFDYDFPLLCAELRRLGARLPRDTVCLDTLPA
LRGLDRAHSHGTRARGRQGYSLGSLFHRYFRAEPSAAHSAEGDVHTLLLI
FLHRAAELLAWADEQARGWAHIEPMYLPPDDPSLEA.
3′ three prime repair exonuclease 2 (TREX2) -
mouse
Accession No. NM_011907
(SEQ ID NO: 3866)
MSEPPRAETFVFLDLEATGLPNMDPEIAEISLFAVHRSSLENPERDDSGS
LVLPRVLDKLTLCMCPERPFTAKASEITGLSSESLMHCGKAGFNGAVVRT
LQGFLSRQEGPICLVAHNGFDYDFPLLCTELQRLGAHLPQDTVCLDTLPA
LRGLDRAHSHGTRAQGRKSYSLASLFHRYFQAEPSAAHSAEGDVHTLLLI
FLHRAPELLAWADEQARSWAHIEPMYVPPDGPSLEA.
3′ three prime repair exonuclease 2 (TREX2) -
rat
Accession No. NM_001107580
(SEQ ID NO: 3867)
MSEPLRAETFVFLDLEATGLPNMDPEIAEISLFAVHRSSLENPERDDSGS
LVLPRVLDKLTLCMCPERPFTAKASEITGLSSEGLMNCRKAAFNDAVVRT
LQGFLSRQEGPICLVAHNGFDYDFPLLCTELQRLGAHLPRDTVCLDTLPA
LRGLDRVHSHGTRAQGRKSYSLASLFHRYFQAEPSAAHSAEGDVNTLLLI
FLHRAPELLAWADEQARSWAHIEPMYVPPDGPSLEA.

### ExoI

[0577] Human exonuclease 1 (EXO1) has been implicated in many different DNA metabolic processes, including DNA mismatch repair (MMR), micro-mediated end-joining, homologous recombination (HR), and replication. Human EXO1 belongs to a family of eukaryotic nucleases, Rad2/XPG, which also include FEN1 and GEN1. The Rad2/XPG family is conserved in the nuclease domain through species from phage to human. The EXO1 gene product exhibits both 5′ exonuclease and 5′ flap activity. Additionally, EXO1 contains an intrinsic 5′ RNase H activity. Human EXO1 has a high affinity for processing double stranded DNA (dsDNA), nicks, gaps, pseudo Y structures and can resolve Holliday junctions using its inherit flap activity. Human EXO1 is implicated in MMR and contain conserved binding domains interacting directly with MLH1 and MSH2. EXO1 nucleolytic activity is positively stimulated by PCNA, MutSα (MSH2/MSH6 complex), 14-3-3, MRN and 9-1-1 complex.

exonuclease 1 (EXO1) Accession No. NM_003686
(Homo sapiens exonuclease 1 (EXO1), transcript
variant 3) - isoform A
(SEQ ID NO: 3868)
MGIQGLLQFIKEASEPIHVRKYKGQVVAVDTYCWLHKGAIACAEKLAKG
EPTDRYVGFCMKFVNMLLSHGIKPILVFDGCTLPSKKEVERSRRERRQA
NLLKGKQLLREGKVSEARECFTRSINITHAMAHKVIKAARSQGVDCLVA
PYEADAQLAYLNKAGIVQAIITEDSDLLAFGCKKVILKMDQFGNGLEID
QARLGMCRQLGDVFTEEKFRYMCILSGCDYLSSLRGIGLAKACKVLRLA
NNPDIVKVIKKIGHYLKMNITVPEDYINGFIRANNTFLYQLVFDPIKRK
LIPLNAYEDDVDPETLSYAGQYVDDSIALQIALGNKDINTFEQIDDYNP
DTAMPAHSRSHSWDDKTCQKSANVSSIWHRNYSPRPESGTVSDAPQLKE
NPSTVGVERVISTKGLNLPRKSSIVKRPRSAELSEDDLLSQYSLSFTKK
TKKNSSEGNKSLSFSEVFVPDLVNGPTNKKSVSTPPRTRNKFATFLQRK
NEESGAVVVPGTRSRFFCSSDSTDCVSNKVSIQPLDETAVTDKENNLHE
SEYGDQEGKRLVDTDVARNSSDDIPNNHIPGDHIPDKATVFTDEESYSF
ESSKFTRTISPPTLGTLRSCFSWSGGLGDFSRTPSPSPSTALQQFRRKS
DSPTSLPENNMSDVSQLKSEESSDDESHPLREEACSSQSQESGEFSLQS
SNASKLSQCSSKDSDSEESDCNIKLLDSQSDQTSKLRLSHFSKKDTPLR
NKVPGLYKSSSADSLSTTKIKPLGPARASGLSKKPASIQKRKHHNAENK
PGLQIKLNELWKNFGFKKF.
exonuclease 1 (EXO1) Accession No. NM_006027
(Homo sapiens exonuclease 1 (EXO1), transcript
variant 3) - isoform B
(SEQ ID NO: 3869)
MGIQGLLQFIKEASEPIHVRKYKGQVVAVDTYCWLHKGAIACAEKLAKG
EPTDRYVGFCMKFVNMLLSHGIKPILVFDGCTLPSKKEVERSRRERRQA
NLLKGKQLLREGKVSEARECFTRSINITHAMAHKVIKAARSQGVDCLVA
PYEADAQLAYLNKAGIVQAIITEDSDLLAFGCKKVILKMDQFGNGLEID
QARLGMCRQLGDVFTEEKFRYMCILSGCDYLSSLRGIGLAKACKVLRLA
NNPDIVKVIKKIGHYLKMNITVPEDYINGFIRANNTFLYQLVFDPIKRK
LIPLNAYEDDVDPETLSYAGQYVDDSIALQIALGNKDINTFEQIDDYNP
DTAMPAHSRSHSWDDKTCQKSANVSSIWHRNYSPRPESGTVSDAPQLKE
NPSTVGVERVISTKGLNLPRKSSIVKRPRSAELSEDDLLSQYSLSFTKK
TKKNSSEGNKSLSFSEVFVPDLVNGPTNKKSVSTPPRTRNKFATFLQRK
NEESGAVVVPGTRSRFFCSSDSTDCVSNKVSIQPLDETAVTDKENNLHE
SEYGDQEGKRLVDTDVARNSSDDIPNNHIPGDHIPDKATVFTDEESYSF
ESSKFTRTISPPTLGTLRSCFSWSGGLGDFSRTPSPSPSTALQQFRRKS
DSPTSLPENNMSDVSQLKSEESSDDESHPLREEACSSQSQESGEFSLQS
SNASKLSQCSSKDSDSEESDCNIKLLDSQSDQTSKLRLSHFSKKDTPLR
NKVPGLYKSSSADSLSTTKIKPLGPARASGLSKKPASIQKRKHHNAENK
PGLQIKLNELWKNFGFKKDSEKLPPCKKPLSPVRDNIQLTPEAEEDIFN
KPECGRVQRAIFQ.
exonuclease 1 (EXO1) Accession No. NM_001319224
(Homo sapiens exonuclease 1 (EXO1), transcript
variant 4) - isoform C
(SEQ ID NO: 3870)
MGIQGLLQFIKEASEPIHVRKYKGQVVAVDTYCWLHKGAIACAEKLAKG
EPTDRYVGFCMKFVNMLLSHGIKPILVFDGCTLPSKKEVERSRRERRQA
NLLKGKQLLREGKVSEARECFTRSINITHAMAHKVIKAARSQGVDCLVA
PYEADAQLAYLNKAGIVQAIITEDSDLLAFGCKKVILKMDQFGNGLEID
QARLGMCRQLGDVFTEEKFRYMCILSGCDYLSSLRGIGLAKACKVLRLA
NNPDIVKVIKKIGHYLKMNITVPEDYINGFIRANNTFLYQLVFDPIKRK
LIPLNAYEDDVDPETLSYAGQYVDDSIALQIALGNKDINTFEQIDDYNP
DTAMPAHSRSHSWDDKTCQKSANVSSIWHRNYSPRPESGTVSDAPQLKE
NPSTVGVERVISTKGLNLPRKSIVKRPRSELSEDDLLSQYSLSFTKKTK
KNSSEGNKSLSFSEVFVPDLVNGPTNKKSVSTPPRTRNKFATFLQRKNE
ESGAVVVPGTRSRFFCSSDSTDCVSNKVSIQPLDETAVTDKENNLHESE
YGDQEGKRLVDTDVARNSSDDIPNNHIPGDHIPDKATVFTDEESYSFES
SKFTRTISPPTLGTLRSCFSWSGGLGDFSRTPSPSPSTALQQFRRKSDS
PTSLPENNMSDVSQLKSEESSDDESHPLREEACSSQSQESGEFSLQSSN
ASKLSQCSSKDSDSEESDCNIKLLDSQSDQTSKLRLSHFSKKDTPLRNK
VPGLYKSSSADSLSTTKIKPLGPARASGLSKKPASIQKRKHHNAENKPG
LQIKLNELWKNFGFKKDSEKLPPCKKPLSPVRDNIQLTPEAEEDIFNKP
ECGRVQRAIFQ.

[0578] D. Inteins and Split-Inteins

[0579] It will be understood that in some embodiments (e.g., delivery of a prime editor in vivo using AAV particles), it may be advantageous to split a polypeptide (e.g., a deaminase or a napDNAbp) or a fusion protein (e.g., a prime editor) into an N-terminal half and a C-terminal half, delivery them separately, and then allow their colocalization to reform the complete protein (or fusion protein as the case may be) within the cell. Separate halves of a protein or a fusion protein may each comprise a split-intein tag to facilitate the reformation of the complete protein or fusion protein by the mechanism of protein trans splicing.

[0580] Protein trans-splicing, catalyzed by split inteins, provides an entirely enzymatic method for protein ligation. A split-intein is essentially a contiguous intein (e.g. a mini-intein) split into two pieces named N-intein and C-intein, respectively. The N-intein and C-intein of a split intein can associate non-covalently to form an active intein and catalyze the splicing reaction essentially in same way as a contiguous intein does. Split inteins have been found in nature and also engineered in laboratories. As used herein, the term “split intein” refers to any intein in which one or more peptide bond breaks exists between the N-terminal and C-terminal amino acid sequences such that the N-terminal and C-terminal sequences become separate molecules that can non-covalently reassociate, or reconstitute, into an intein that is functional for trans-splicing reactions. Any catalytically active intein, or fragment thereof, may be used to derive a split intein for use in the methods of the invention. For example, in one aspect the split intein may be derived from a eukaryotic intein. In another aspect, the split intein may be derived from a bacterial intein. In another aspect, the split intein may be derived from an archaeal intein. Preferably, the split intein so-derived will possess only the amino acid sequences essential for catalyzing trans-splicing reactions.

[0581] As used herein, the “N-terminal split intein (In)” refers to any intein sequence that comprises an N-terminal amino acid sequence that is functional for trans-splicing reactions. An In thus also comprises a sequence that is spliced out when trans-splicing occurs. An In can comprise a sequence that is a modification of the N-terminal portion of a naturally occurring intein sequence. For example, an In can comprise additional amino acid residues and/or mutated residues so long as the inclusion of such additional and/or mutated residues does not render the In non-functional in trans-splicing. Preferably, the inclusion of the additional and/or mutated residues improves or enhances the trans-splicing activity of the In.

[0582] As used herein, the “C-terminal split intein (Ic)” refers to any intein sequence that comprises a C-terminal amino acid sequence that is functional for trans-splicing reactions. In one aspect, the Ic comprises 4 to 7 contiguous amino acid residues, at least 4 amino acids of which are from the last β-strand of the intein from which it was derived. An Ic thus also comprises a sequence that is spliced out when trans-splicing occurs. An Ic can comprise a sequence that is a modification of the C-terminal portion of a naturally occurring intein sequence. For example, an Ic can comprise additional amino acid residues and/or mutated residues so long as the inclusion of such additional and/or mutated residues does not render the In non-functional in trans-splicing. Preferably, the inclusion of the additional and/or mutated residues improves or enhances the trans-splicing activity of the Ic.

[0583] In some embodiments of the invention, a peptide linked to an Ic or an In can comprise an additional chemical moiety including, among others, fluorescence groups, biotin, polyethylene glycol (PEG), amino acid analogs, unnatural amino acids, phosphate groups, glycosyl groups, radioisotope labels, and pharmaceutical molecules. In other embodiments, a peptide linked to an Ic can comprise one or more chemically reactive groups including, among others, ketone, aldehyde, Cys residues and Lys residues. The N-intein and C-intein of a split intein can associate non-covalently to form an active intein and catalyze the splicing reaction when an “intein-splicing polypeptide (ISP)” is present. As used herein, “intein-splicing polypeptide (ISP)” refers to the portion of the amino acid sequence of a split intein that remains when the Ic, In, or both, are removed from the split intein. In certain embodiments, the In comprises the ISP. In another embodiment, the Ic comprises the ISP. In yet another embodiment, the ISP is a separate peptide that is not covalently linked to In nor to Ic.

[0584] Split inteins may be created from contiguous inteins by engineering one or more split sites in the unstructured loop or intervening amino acid sequence between the −12 conserved beta-strands found in the structure of mini-inteins. Some flexibility in the position of the split site within regions between the beta-strands may exist, provided that creation of the split will not disrupt the structure of the intein, the structured beta-strands in particular, to a sufficient degree that protein splicing activity is lost.

[0585] In protein trans-splicing, one precursor protein consists of an N-extein part followed by the N-intein, another precursor protein consists of the C-intein followed by a C-extein part, and a trans-splicing reaction (catalyzed by the N- and C-inteins together) excises the two intein sequences and links the two extein sequences with a peptide bond. Protein trans-splicing, being an enzymatic reaction, can work with very low (e.g. micromolar) concentrations of proteins and can be carried out under physiological conditions.

[0586] Exemplary sequences are as follows:

| NAME | SEQUENCE OF LIGAND-DEPENDENT INTEIN |
|---|---|
| 2-4 INTEIN: | CLAEGTRIFDPVTGTTHRIEDVVDGRKPIHVVAAAKDGTLLARPVV |
| | SWFDQGTRDVIGLRIAGGAIVWATPDHKVLTEYGWRAAGELRKGD |
| | RVAGPGGSGNSLALSLTADQMVSALLDAEPPILYSEYDPTSPFSEAS |
| | MMGLLTNLADRELVHMINWAKRVPGFVDLTLHDQAHLLECAWLEI |
| | LMIGLVWRSMEHPGKLLFAPNLLLDRNQGKCVEGMVEIFDMLLAT |
| | SSRFRMMNLQGEEFVCLKSIILLNSGVYTFLSSTLKSLEEKDHIHRA |
| | LDKITDTLIHLMAKAGLTLQQQHQRLAQLLLILSHIRHMSNKGMEH |
| | LYSMKYKNVVPLYDLLLEMLDAHRLHAGGSGASRVQAFADALDD |
| | KFLHDMLAEELRYSVIREVLPTRRARTFDLEVEELHTLVAEGVVVH |
| | NC (SEQ ID NO: 8) |
| 3-2 INTEIN | CLAEGTRIFDPVTGTTHRIEDVVDGRKPIHVVAVAKDGTLLARPVVS |
| | WFDQGTRDVIGLRIAGGAIVWATPDHKVLTEYGWRAAGELRKGDR |
| | VAGPGGSGNSLALSLTADQMVSALLDAEPPILYSEYDPTSPFSEASM |
| | MGLLTNLADRELVHMINWAKRVPGFVDLTLHDQAHLLECAWLEIL |
| | MIGLVWRSMEHPGKLLFAPNLLLDRNQGKCVEGMVEIFDMLLATS |
| | SRFRMMNLQGEEFVCLKSIILLNSGVYTFLSSTLKSLEEKDHIHRAL |
| | DKITDTLIHLMAKAGLTLQQQHQRLAQLLLILSHIRHMSNKGMEHL |
| | YSMKYTNVVPLYDLLLEMLDAHRLHAGGSGASRVQAFADALDDK |
| | FLHDMLAEELRYSVIREVLPTRRARTFDLEVEELHTLVAEGVVVHN |
| | C (SEQ ID NO: 9) |
| 30R3-1 INTEIN | CLAEGTRIFDPVTGTTHRIEDVVDGRKPIHVVAAAKDGTLLARPVV |
| | SWFDQGTRDVIGLRIAGGATVWATPDHKVLTEYGWRAAGELRKG |
| | DRVAGPGGSGNSLALSLTADQMVSALLDAEPPIPYSEYDPTSPFSEA |
| | SMMGLLTNLADRELVHMINWAKRVPGFVDLTLHDQAHLLECAWL |
| | EILMIGLVWRSMEHPGKLLFAPNLLLDRNQGKCVEGMVEIFDMLL |
| | ATSSRFRMMNLQGEEFVCLKSIILLNSGVYTFLSSTLKSLEEKDHIH |
| | RALDKITDTLIHLMAKAGLTLQQQHQRLAQLLLILSHIRHMSNKGM |
| | EHLYSMKYKNVVPLYDLLLEMLDAHRLHAGGSGASRVQAFADAL |
| | DDKFLHDMLAEGLRYSVIREVLPTRRARTFDLEVEELHTLVAEGVV |
| | VHNC (SEQ ID NO: 10) |
| 30R3-2 INTEIN | CLAEGTRIFDPVTGTTHRIEDVVDGRKPIHVVAAAKDGTLLARPVV |
| | SWFDQGTRDVIGLRIAGGATVWATPDHKVLTEYGWRAAGELRKG |
| | DRVAGPGGSGNSLALSLTADQMVSALLDAEPPILYSEYDPTSPFSEA |
| | SMMGLLTNLADRELVHMINWAKRVPGFVDLTLHDQAHLLECAWL |
| | EILMIGLVWRSMEHPGKLLFAPNLLLDRNQGKCVEGMVEIFDMLL |
| | ATSSRFRMMNLQGEEFVCLKSIILLNSGVYTFLSSTLKSLEEKDHIH |
| | RALDKITDTLIHLMAKAGLTLQQQHQRLAQLLLILSHIRHMSNKGM |
| | EHLYSMKYKNVVPLYDLLLEMLDAHRLHAGGSGASRVQAFADAL |
| | DDKFLHDMLAEELRYSVIREVLPTRRARTFDLEVEELHTLVAEGVV |
| | VHNC (SEQ ID NO: 11) |
| 30R3-3 INTEIN | CLAEGTRIFDPVTGTTHRIEDVVDGRKPIHVVAAAKDGTLLARPVV |
| | SWFDQGTRDVIGLRIAGGATVWATPDHKVLTEYGWRAAGELRKG |
| | DRVAGPGGSGNSLALSLTADQMVSALLDAEPPIPYSEYDPTSPFSEA |
| | SMMGLLTNLADRELVHMINWAKRVPGFVDLTLHDQAHLLECAWL |
| | EILMIGLVWRSMEHPGKLLFAPNLLLDRNQGKCVEGMVEIFDMLL |
| | ATSSRFRMMNLQGEEFVCLKSIILLNSGVYTFLSSTLKSLEEKDHIH |
| | RALDKITDTLIHLMAKAGLTLQQQHQRLAQLLLILSHIRHMSNKGM |
| | EHLYSMKYKNVVPLYDLLLEMLDAHRLHAGGSGASRVQAFADAL |
| | DDKFLHDMLAEELRYSVIREVLPTRRARTFDLEVEELHTLVAEGVV |
| | VHNC (SEQ ID NO: 12) |
| 37R3-1 INTEIN | CLAEGTRIFDPVTGTTHRIEDVVDGRKPIHVVAAAKDGTLLARPVV |
| | SWFDQGTRDVIGLRIAGGATVWATPDHKVLTEYGWRAAGELRKG |
| | DRVAGPGGSGNSLALSLTADQMVSALLDAEPPILYSEYNPTSPFSEA |
| | SMMGLLTNLADRELVHMINWAKRVPGFVDLTLHDQAHLLERAWL |
| | EILMIGLVWRSMEHPGKLLFAPNLLLDRNQGKCVEGMVEIFDMLL |
| | ATSSRFRMMNLQGEEFVCLKSIILLNSGVYTFLSSTLKSLEEKDHIH |
| | RALDKITDTLIHLMAKAGLTLQQQHQRLAQLLLILSHIRHMSNKGM |
| | EHLYSMKYKNVVPLYDLLLEMLDAHRLHAGGSGASRVQAFADAL |
| | DDKFLHDMLAEGLRYSVIREVLPTRRARTFDLEVEELHTLVAEGVV |
| | VHNC ((SEQ ID NO: 13) |
| 37R3-2 INTEIN | CLAEGTRIFDPVTGTTHRIEDVVDGRKPIHVVAAAKDGTLLARPVV |
| | SWFDQGTRDVIGLRIAGGAIVWATPDHKVLTEYGWRAAGELRKGD |
| | RVAGPGGSGNSLALSLTADQMVSALLDAEPPILYSEYDPTSPFSEAS |
| | MMGLLTNLADRELVHMINWAKRVPGFVDLTLHDQAHLLERAWLEI |
| | LMIGLVWRSMEHPGKLLFAPNLLLDRNQGKCVEGMVEIFDMLLAT |
| | SSRFRMMNLQGEEFVCLKSIILLNSGVYTFLSSTLKSLEEKDHIHRA |
| | LDKITDTLIHLMAKAGLTLQQQHQRLAQLLLILSHIRHMSNKGMEH |
| | LYSMKYKNVVPLYDLLLEMLDAHRLHAGGSGASRVQAFADALDD |
| | KFLHDMLAEGLRYSVIREVLPTRRARTFDLEVEELHTLVAEGVVVH |
| | NC (SEQ ID NO: 14) |
| 37R3-3 INTEIN | CLAEGTRIFDPVTGTTHRIEDVVDGRKPIHVVAVAKDGTLLARPVVS |
| | WFDQGTRDVIGLRIAGGATVWATPDHKVLTEYGWRAAGELRKGD |
| | RVAGPGGSGNSLALSLTADQMVSALLDAEPPILYSEYDPTSPFSEAS |
| | MMGLLTNLADRELVHMINWAKRVPGFVDLTLHDQAHLLERAWLEI |
| | LMIGLVWRSMEHPGKLLFAPNLLLDRNQGKCVEGMVEIFDMLLAT |
| | SSRFRMMNLQGEEFVCLKSIILLNSGVYTFLSSTLKSLEEKDHIHRA |
| | LDKITDTLIHLMAKAGLTLQQQHQRLAQLLLILSHIRHMSNKGMEH |
| | LYSMKYKNVVPLYDLLLEMLDAHRLHAGGSGASRVQAFADALDD |
| | KFLHDMLAEELRYSVIREVLPTRRARTFDLEVEELHTLVAEGVVVH |
| | NC (SEQ ID NO: 15) |

[0587] Although inteins are most frequently found as a contiguous domain, some exist in a naturally split form. In this case, the two fragments are expressed as separate polypeptides and must associate before splicing takes place, so-called protein trans-splicing.

[0588] An exemplary split intein is the Ssp DnaE intein, which comprises two subunits, namely, DnaE-N and DnaE-C. The two different subunits are encoded by separate genes, namely dnaE-n and dnaE-c, which encode the DnaE-N and DnaE-C subunits, respectively. DnaE is a naturally occurring split intein in Synechocytis sp. PCC6803 and is capable of directing trans-splicing of two separate proteins, each comprising a fusion with either DnaE-N or DnaE-C.

[0589] Additional naturally occurring or engineered split-intein sequences are known in the or can be made from whole-intein sequences described herein or those available in the art. Examples of split-intein sequences can be found in Stevens et al., “A promiscuous split intein with expanded protein engineering applications,” PNAS, 2017, Vol. 114: 8538-8543; Iwai et al., “Highly efficient protein trans-splicing by a naturally split DnaE intein from Nostc punctiforme, FEBS Lett, 580: 1853-1858, each of which are incorporated herein by reference. Additional split intein sequences can be found, for example, in WO 2013/045632, WO 2014/055782, WO 2016/069774, and EP2877490, the contents each of which are incorporated herein by reference.

[0590] In addition, protein splicing in trans has been described in vivo and in vitro (Shingledecker, et al., Gene 207:187 (1998), Southworth, et al., EMBO J. 17:918 (1998); Mills, et al., Proc. Natd. Acad. Sci. USA, 95:3543-3548 (1998); Lew, et al., J. Biol. Chem., 273:15887-15890 (1998); Wu, et al., Biochim. Biophys. Acta 35732:1 (1998b), Yamazaki, et al., J. Am. Chem. Soc. 120:5591 (1998), Evans, et al., J. Biol. Chem. 275:9091 (2000); Otomo, et al., Biochemistry 38:16040-16044 (1999); Otomo, et al., J. Biolmol. NMR 14:105-114 (1999); Scott, et al., Proc. Natd. Acad. Sci. USA 96:13638-13643 (1999)) and provides the opportunity to express a protein as to two inactive fragments that subsequently undergo ligation to form a functional product, e.g., as shown in FIGS. 66 and 67 with regard to the formation of a complete PE fusion protein from two separately-expressed halves.

[0591] E. RNA-Protein Interaction Domain

[0592] In various embodiments, two separate protein domains (e.g., a Cas9 domain and a polymerase domain) may be colocalized to one another to form a functional complex (akin to the function of a fusion protein comprising the two separate protein domains) by using an “RNA-protein recruitment system,” such as the “MS2 tagging technique.” Such systems generally tag one protein domain with an “RNA-protein interaction domain” (aka “RNA-protein recruitment domain”) and the other with an “RNA-binding protein” that specifically recognizes and binds to the RNA-protein interaction domain, e.g., a specific hairpin structure. These types of systems can be leveraged to colocalize the domains of a prime editor, as well as to recruitment additional functionalities to a prime editor, such as a UGI domain. In one example, the MS2 tagging technique is based on the natural interaction of the MS2 bacteriophage coat protein (“MCP” or “MS2cp”) with a stem-loop or hairpin structure present in the genome of the phage, i.e., the “MS2 hairpin.” In the case of the MS2 hairpin, it is recognized and bound by the MS2 bacteriophage coat protein (MCP). Thus, in one exemplarily scenario a deaminase-MS2 fusion can recruit a Cas9-MCP fusion.

[0593] A review of other modular RNA-protein interaction domains are described in the art, for example, in Johansson et al., “RNA recognition by the MS2 phage coat protein,” Sem Virol., 1997, Vol. 8(3): 176-185; Delebecque et al., “Organization of intracellular reactions with rationally designed RNA assemblies,” Science, 2011, Vol. 333: 470-474; Mali et al., “Cas9 transcriptional activators for target specificity screening and paired nickases for cooperative genome engineering,” Nat. Biotechnol., 2013, Vol. 31: 833-838; and Zalatan et al., “Engineering complex synthetic transcriptional programs with CRISPR RNA scaffolds,” Cell, 2015, Vol. 160: 339-350, each of which are incorporated herein by reference in their entireties. Other systems include the PP7 hairpin, which specifically recruits the PCP protein, and the “com” hairpin, which specifically recruits the Com protein. See Zalatan et al.

[0594] The nucleotide sequence of the MS2 hairpin (or equivalently referred to as the “MS2 aptamer”) is: GCCAACATGAGGATCACCCATGTCTGCAGGGCC (SEQ ID NO: 763).

[0595] The amino acid sequence of the MCP or MS2cp is:

(SEQ ID NO: 764)
GSASNFTQFVLVDNGGTGDVTVAPSNFANGVAEWISSNSRSQAYKVTCSV
RQSSAQNRKYTIKVEVPKVATQTVGGEELPVAGWRSYLNMELTIPIFATN
SDCELIVKAMQGLLKDGNPIPSAIAANSGIY.

[0596] F. UGI Domain

[0597] In other embodiments, the prime editors described herein may comprise one or more uracil glycosylase inhibitor domains. The term “uracil glycosylase inhibitor (UGI)” or “UGI domain,” as used herein, refers to a protein that is capable of inhibiting a uracil-DNA glycosylase base-excision repair enzyme. In some embodiments, a UGI domain comprises a wild-type UGI or a UGI as set forth in SEQ ID NO: 3873. In some embodiments, the UGI proteins provided herein include fragments of UGI and proteins homologous to a UGI or a UGI fragment. For example, in some embodiments, a UGI domain comprises a fragment of the amino acid sequence set forth in SEQ ID NO: 3873. In some embodiments, a UGI fragment comprises an amino acid sequence that comprises at least 60%, at least 65%, at least 70%, at least 75%, at least 80%, at least 85%, at least 90%, at least 95%, at least 96%, at least 97%, at least 98%, at least 99%, or at least 99.5% of the amino acid sequence as set forth in SEQ ID NO: 3873. In some embodiments, a UGI comprises an amino acid sequence homologous to the amino acid sequence set forth in SEQ ID NO: 3873, or an amino acid sequence homologous to a fragment of the amino acid sequence set forth in SEQ ID NO: 3873. In some embodiments, proteins comprising UGI or fragments of UGI or homologs of UGI or UGI fragments are referred to as “UGI variants.” A UGI variant shares homology to UGI, or a fragment thereof. For example a UGI variant is at least 70% identical, at least 75% identical, at least 80% identical, at least 85% identical, at least 90% identical, at least 95% identical, at least 96% identical, at least 97% identical, at least 98% identical, at least 99% identical, at least 99.5% identical, or at least 99.9% identical to a wild type UGI or a UGI as set forth in SEQ ID NO: 3873. In some embodiments, the UGI variant comprises a fragment of UGI, such that the fragment is at least 70% identical, at least 80% identical, at least 90% identical, at least 95% identical, at least 96% identical, at least 97% identical, at least 98% identical, at least 99% identical, at least 99.5% identical, or at least 99.9% to the corresponding fragment of wild-type UGI or a UGI as set forth in SEQ ID NO: 3873. In some embodiments, the UGI comprises the following amino acid sequence:

Uracil-DNA glycosylase inhibitor:
>sp|P14739|UNGI_BPPB2
(SEQ ID NO: 3873)
MTNLSDIIEKETGKQLVIQESILMLPEEVEEVIGNKPESDILVHTAYDES
TDENVMLLTSDAPEYKPWALVIQDSNGENKIKML.

[0598] The prime editors described herein may comprise more than one UGI domain, which may be separated by one or more linkers as described herein.

[0599] G. Additional PE Elements

[0600] In certain embodiments, the prime editors described herein may comprise an inhibitor of base repair. The term “inhibitor of base repair” or “IBR” refers to a protein that is capable in inhibiting the activity of a nucleic acid repair enzyme, for example a base excision repair enzyme. In some embodiments, the IBR is an inhibitor of OGG base excision repair. In some embodiments, the IBR is an inhibitor of base excision repair (“iBER”). Exemplary inhibitors of base excision repair include inhibitors of APE 1, Endo III, Endo IV, Endo V, Endo VIII, Fpg, hOGG1, hNEIL1, T7 EndoI, T4PDG, UDG, hSMUG1, and hAAG. In some embodiments, the IBR is an inhibitor of Endo V or hAAG. In some embodiments, the IBR is an iBER that may be a catalytically inactive glycosylase or catalytically inactive dioxygenase or a small molecule or peptide inhibitor of an oxidase, or variants thereof. In some embodiments, the IBR is an iBER that may be a TDG inhibitor, MBD4 inhibitor or an inhibitor of an AlkBH enzyme. In some embodiments, the IBR is an iBER that comprises a catalytically inactive TDG or catalytically inactive MBD4. An exemplary catalytically inactive TDG is an N140A mutant of SEQ ID NO: 3872 (human TDG).

[0601] Some exemplary glycosylases are provided below. The catalytically inactivated variants of any of these glycosylase domains are iBERs that may be fused to the napDNAbp or polymerase domain of the prime editors provided in this disclosure.

OGG (human)
(SEQ ID NO: 3937)
MPARALLPRRMGHRTLASTPALWASIPCPRSELRLDLVLPSGQSFRWREQ
SPAHWSGVLADQVWTLTQTEEQLHCTVYRGDKSQASRPTPDELEAVRKYF
QLDVTLAQLYHHWGSVDSHFQEVAQKFQGVRLLRQDPIECLFSFICSSNN
NIARITGMVERLCQAFGPRLIQLDDVTYHGFPSLQALAGPEVEAHLRKLG
LGYRARYVSASARAILEEQGGLAWLQQLRESSYEEAHKALCILPGVGTKV
ADCICLMALDKPQAVPVDVHMWHIAQRDYSWHPTTSQAKGPSPQTNKELG
NFFRSLWGPYAGWAQAVLFSADLRQSRHAQEPPAKRRKGSKGPEG
MPG (human)
(SEQ ID NO: 3938)
MVTPALQMKKPKQFCRRMGQKKQRPARAGQPHSSSDAAQAPAEQPHSSSD
AAQAPCPRERCLGPPTTPGPYRSIYFSSPKGHLTRLGLEFFDQPAVPLAR
AFLGQVLVRRLPNGTELRGRIVETEAYLGPEDEAAHSRGGRQTPRNRGMF
MKPGTLYVYIIYGMYFCMNISSQGDGACVLLRALEPLEGLETMRQLRSTL
RKGTASRVLKDRELCSGPSKLCQALAINKSFDQRDLAQDEAVWLERGPLE
PSEPAVVAAARVGVGHAGEWARKPLRFYVRGSPWVSVVDRVAEQDTQA
MBD4 (human)
(SEQ ID NO: 3871)
MGTTGLESLSLGDRGAAPTVTSSERLVPDPPNDLRKEDVAMELERVGEDE
EQMMIKRSSECNPLLQEPIASAQFGATAGTECRKSVPCGWERVVKQRLFG
KTAGRFDVYFISPQGLKFRSKSSLANYLHKNGETSLKPEDFDFTVLSKRG
IKSRYKDCSMAALTSHLQNQSNNSNWNLRTRSKCKKDVFMPPSSSSELQE
SRGLSNFTSTHLLLKEDEGVDDVNFRKVRKPKGKVTILKGIPIKKTKKGC
RKSCSGFVQSDSKRESVCNKADAESEPVAQKSQLDRTVCISDAGACGETL
SVTSEENSLVKKKERSLSSGSNFCSEQKTSGIINKFCSAKDSEHNEKYED
TFLESEEIGTKVEVVERKEHLHTDILKRGSEMDNNCSPTRKDFTGEKIFQ
EDTIPRTQIERRKTSLYFSSKYNKEALSPPRRKAFKKWTPPRSPFNLVQE
TLFHDPWKLLIATIFLNRTSGKMAIPVLWKFLEKYPSAEVARTADWRDVS
ELLKPLGLYDLRAKTIVKFSDEYLTKQWKYPIELHGIGKYGNDSYRIFCV
NEWKQVHPEDHKLNKYHDWLWENHEKLSLS
TDG (human)
(SEQ ID NO: 3872)
MEAENAGSYSLQQAQAFYTFPFQQLMAEAPNMAVVNEQQMPEEVPAPAPA
QEPVQEAPKGRKRKPRTTEPKQPVEPKKPVESKKSGKSAKSKEKQEKITD
TFKVKRKVDRFNGVSEAELLTKTLPDILTFNLDIVIIGINPGLMAAYKGH
HYPGPGNHFWKCLFMSGLSEVQLNHMDDHTLPGKYGIGFTNMVERTTPGS
KDLSSKEFREGGRILVQKLQKYQPRIAVFNGKCIYEIFSKEVFGVKVKNL
EFGLQPHKIPDTETLCYVMPSSSARCAQFPRAQDKVHYYIKLKDLRDQLK
GIERNMDVQEVQYTFDLQLAQEDAKKMAVKEEKYDPGYEAAYGGAYGENP
CSSEPCGFSSNGLIESVELRGESAFSGIPNGQWMTQSFTDQIPSFSNHCG
TQEQEEESHA

[0602] In some embodiments, the fusion proteins described herein may comprise one or more heterologous protein domains (e.g., about or more than about 1, 2, 3, 4, 5, 6, 7, 8, 9, 10, or more domains in addition to the prime editor components). A fusion protein may comprise any additional protein sequence, and optionally a linker sequence between any two domains. Other exemplary features that may be present are localization sequences, such as cytoplasmic localization sequences, export sequences, such as nuclear export sequences, or other localization sequences, as well as sequence tags that are useful for solubilization, purification, or detection of the fusion proteins.

[0603] Examples of protein domains that may be fused to a prime editor or component thereof (e.g., the napDNAbp domain, the polymerase domain, or the NLS domain) include, without limitation, epitope tags, and reporter gene sequences. Non-limiting examples of epitope tags include histidine (His) tags, V5 tags, FLAG tags, influenza hemagglutinin (HA) tags, Myc tags, VSV-G tags, and thioredoxin (Trx) tags. Examples of reporter genes include, but are not limited to, glutathione-5-transferase (GST), horseradish peroxidase (HRP), chloramphenicol acetyltransferase (CAT), beta-galactosidase, beta-glucuronidase, luciferase, green fluorescent protein (GFP), HcRed, DsRed, cyan fluorescent protein (CFP), yellow fluorescent protein (YFP), and autofluorescent proteins including blue fluorescent protein (BFP). A prime editor may be fused to a gene sequence encoding a protein or a fragment of a protein that bind DNA molecules or bind other cellular molecules, including, but not limited to, maltose binding protein (MBP), S-tag, Lex A DNA binding domain (DBD) fusions, GAL4 DNA binding domain fusions, and herpes simplex virus (HSV) BP16 protein fusions. Additional domains that may form part of a prime editor are described in US Patent Publication No. 2011/0059502, published Mar. 10, 2011 and incorporated herein by reference in its entirety.

[0604] In an aspect of the disclosure, a reporter gene which includes, but is not limited to, glutathione-5-transferase (GST), horseradish peroxidase (HRP), chloramphenicol acetyltransferase (CAT) beta-galactosidase, beta-glucuronidase, luciferase, green fluorescent protein (GFP), HcRed, DsRed, cyan fluorescent protein (CFP), yellow fluorescent protein (YFP), and autofluorescent proteins including blue fluorescent protein (BFP), may be introduced into a cell to encode a gene product which serves as a marker by which to measure the alteration or modification of expression of the gene product. In certain embodiments of the disclosure the gene product is luciferase. In a further embodiment of the disclosure the expression of the gene product is decreased.

[0605] Suitable protein tags provided herein include, but are not limited to, biotin carboxylase carrier protein (BCCP) tags, myc-tags, calmodulin-tags, FLAG-tags, hemagglutinin (HA)-tags, polyhistidine tags, also referred to as histidine tags or His-tags, maltose binding protein (MBP)-tags, nus-tags, glutathione-S-transferase (GST)-tags, green fluorescent protein (GFP)-tags, thioredoxin-tags, S-tags, Softags (e.g., Softag 1, Softag 3), strep-tags, biotin ligase tags, FlAsH tags, V5 tags, and SBP-tags. Additional suitable sequences will be apparent to those of skill in the art. In some embodiments, the fusion protein comprises one or more His tags.

[0606] In some embodiments of the present disclosure, the activity of the prime editing system may be temporally regulated by adjusting the residence time, the amount, and/or the activity of the expressed components of the PE system. For example, as described herein, the PE may be fused with a protein domain that is capable of modifying the intracellular half-life of the PE. In certain embodiments involving two or more vectors (e.g., a vector system in which the components described herein are encoded on two or more separate vectors), the activity of the PE system may be temporally regulated by controlling the timing in which the vectors are delivered. For example, in some embodiments a vector encoding the nuclease system may deliver the PE prior to the vector encoding the template. In other embodiments, the vector encoding the PEgRNA may deliver the guide prior to the vector encoding the PE system. In some embodiments, the vectors encoding the PE system and PEgRNA are delivered simultaneously. In certain embodiments, the simultaneously delivered vectors temporally deliver, e.g., the PE, PEgRNA, and/or second strand guide RNA components. In further embodiments, the RNA (such as, e.g., the nuclease transcript) transcribed from the coding sequence on the vectors may further comprise at least one element that is capable of modifying the intracellular half-life of the RNA and/or modulating translational control. In some embodiments, the half-life of the RNA may be increased. In some embodiments, the half-life of the RNA may be decreased. In some embodiments, the element may be capable of increasing the stability of the RNA. In some embodiments, the element may be capable of decreasing the stability of the RNA. In some embodiments, the element may be within the 3′ UTR of the RNA. In some embodiments, the element may include a polyadenylation signal (PA). In some embodiments, the element may include a cap, e.g., an upstream mRNA or PEgRNA end. In some embodiments, the RNA may comprise no PA such that it is subject to quicker degradation in the cell after transcription. In some embodiments, the element may include at least one AU-rich element (ARE). The AREs may be bound by ARE binding proteins (ARE-BPs) in a manner that is dependent upon tissue type, cell type, timing, cellular localization, and environment. In some embodiments the destabilizing element may promote RNA decay, affect RNA stability, or activate translation. In some embodiments, the ARE may comprise 50 to 150 nucleotides in length. In some embodiments, the ARE may comprise at least one copy of the sequence AUUUA. In some embodiments, at least one ARE may be added to the 3′ UTR of the RNA. In some embodiments, the element may be a Woodchuck Hepatitis Virus (WHP).

[0607] Posttranscriptional Regulatory Element (WPRE), which creates a tertiary structure to enhance expression from the transcript. In further embodiments, the element is a modified and/or truncated WPRE sequence that is capable of enhancing expression from the transcript, as described, for example in Zufferey et al., J Virol, 73(4): 2886-92 (1999) and Flajolet et al., J Virol, 72(7): 6175-80 (1998). In some embodiments, the WPRE or equivalent may be added to the 3′ UTR of the RNA. In some embodiments, the element may be selected from other RNA sequence motifs that are enriched in either fast- or slow-decaying transcripts.

[0608] In some embodiments, the vector encoding the PE or the PEgRNA may be self-destroyed via cleavage of a target sequence present on the vector by the PE system. The cleavage may prevent continued transcription of a PE or a PEgRNA from the vector. Although transcription may occur on the linearized vector for some amount of time, the expressed transcripts or proteins subject to intracellular degradation will have less time to produce off-target effects without continued supply from expression of the encoding vectors.

### [6] PERNAs

[0609] The prime editing system described herein contemplates the use of any suitable PEgRNAs. The inventors have discovered that the mechanism of target-primed reverse transcription (TPRT) can be leveraged or adapted for conducting precision and versatile CRISPR/Cas-based genome editing through the use of a specially configured guide RNA comprising a reverse transcription (RT) template sequence that codes for the desired nucleotide change. The application refers to this specially configured guide RNA as an “extended guide RNA” or a “PEgRNA” since the RT template sequence can be provided as an extension of a standard or traditional guide RNA molecule. The application contemplates any suitable configuration or arrangement for the extended guide RNA.

[0610] PEgRNA Architecture

[0611] FIG. 3A shows one embodiment of an extended guide RNA usable in the prime editing system disclosed herein whereby a traditional guide RNA (the green portion) includes a ˜20 nt protospacer sequence and a gRNA core region, which binds with the napDNAbp. In this embodiment, the guide RNA includes an extended RNA segment at the 5′ end, i.e., a 5′ extension. In this embodiment, the 5′ extension includes a reverse transcription template sequence, a reverse transcription primer binding site, and an optional 5-20 nucleotide linker sequence. As shown in FIGS. 1A-1B, the RT primer binding site hybrizes to the free 3′ end that is formed after a nick is formed in the non-target strand of the R-loop, thereby priming reverse transcriptase for DNA polymerization in the 5′-3′ direction.

[0612] FIG. 3B shows another embodiment of an extended guide RNA usable in the prime editing system disclosed herein whereby a traditional guide RNA (the green portion) includes a ˜20 nt protospacer sequence and a gRNA core, which binds with the napDNAbp. In this embodiment, the guide RNA includes an extended RNA segment at the 3′ end, i.e., a 3′ extension. In this embodiment, the 3′ extension includes a reverse transcription template sequence, and a reverse transcription primer binding site. As shown in FIGS. 1C-1D, the RT primer binding site hybrizes to the free 3′ end that is formed after a nick is formed in the non-target strand of the R-loop, thereby priming reverse transcriptase for DNA polymerization in the 5′-3′ direction.

[0613] FIG. 3C shows another embodiment of an extend guide RNA usable in the prime editing system disclosed herein whereby a traditional guide RNA (the green portion) includes a ˜20 nt protospacer sequence and a gRNA core, which binds with the napDNAbp. In this embodiment, the guide RNA includes an extended RNA segment at an intermolecular position within the gRNA core, i.e., an intramolecular extension. In this embodiment, the intramolecular extension includes a reverse transcription template sequence, and a reverse transcription primer binding site. The RT primer binding site hybrizes to the free 3′ end that is formed after a nick is formed in the non-target strand of the R-loop, thereby priming reverse transcriptase for DNA polymerization in the 5′-3′ direction.

[0614] In one embodiment, the position of the intermolecular RNA extension is not in the protospacer sequence of the guide RNA. In another embodiment, the position of the intermolecular RNA extension in the gRNA core. In still another embodiment, the position of the intermolecular RNA extension is any with the guide RNA molecule except within the protospacer sequence, or at a position which disrupts the protospacer sequence.

[0615] In one embodiment, the intermolecular RNA extension is inserted downstream from the 3′ end of the protospacer sequence. In another embodiment, the intermolecular RNA extension is inserted at least 1 nucleotide, at least 2 nucleotides, at least 3 nucleotides, at least 4 nucleotides, at least 5 nucleotides, at least 6 nucleotides, at least 7 nucleotides, at least 8 nucleotides, at least 9 nucleotides, at least 10 nucleotides, at least 11 nucleotides, at least 12 nucleotides, at least 13 nucleotides, at least 14 nucleotides, at least 15 nucleotides, at least 16 nucleotides, at least 17 nucleotides, at least 18 nucleotides, at least 19 nucleotides, at least 20 nucleotides, at least 21 nucleotides, at least 22 nucleotides, at least 23 nucleotides, at least 24 nucleotides, at least 25 nucleotides downstream of the 3′ end of the protospacer sequence.

[0616] In other embodiments, the intermolecular RNA extension is inserted into the gRNA, which refers to the portion of the guide RNA corresponding or comprising the tracrRNA, which binds and/or interacts with the Cas9 protein or equivalent thereof (i.e., a different napDNAbp). Preferably the insertion of the intermolecular RNA extension does not disrupt or minimally disrupts the interaction between the tracrRNA portion and the napDNAbp.

[0617] The length of the RNA extension can be any useful length. In various embodiments, the RNA extension is at least 5 nucleotides, at least 6 nucleotides, at least 7 nucleotides, at least 8 nucleotides, at least 9 nucleotides, at least 10 nucleotides, at least 11 nucleotides, at least 12 nucleotides, at least 13 nucleotides, at least 14 nucleotides, at least 15 nucleotides, at least 16 nucleotides, at least 17 nucleotides, at least 18 nucleotides, at least 19 nucleotides, at least 20 nucleotides, at least 21 nucleotides, at least 22 nucleotides, at least 23 nucleotides, at least 24 nucleotides, at least 25 nucleotides, at least 30 nucleotides, at least 40 nucleotides, at least 50 nucleotides, at least 60 nucleotides, at least 70 nucleotides, at least 80 nucleotides, at least 90 nucleotides, at least 100 nucleotides, at least 200 nucleotides, at least 300 nucleotides, at least 400 nucleotides, or at least 500 nucleotides in length.

[0618] The RT template sequence can also be any suitable length. For example, the RT template sequence can be at least 3 nucleotides, at least 4 nucleotides, at least 5 nucleotides, at least 6 nucleotides, at least 7 nucleotides, at least 8 nucleotides, at least 9 nucleotides, at least 10 nucleotides, at least 11 nucleotides, at least 12 nucleotides, at least 13 nucleotides, at least 14 nucleotides, at least 15 nucleotides, at least 16 nucleotides, at least 17 nucleotides, at least 18 nucleotides, at least 19 nucleotides, at least 20 nucleotides, at least 30 nucleotides, at least 40 nucleotides, at least 50 nucleotides, at least 60 nucleotides, at least 70 nucleotides, at least 80 nucleotides, at least 90 nucleotides, at least 100 nucleotides, at least 200 nucleotides, at least 300 nucleotides, at least 400 nucleotides, or at least 500 nucleotides in length.

[0619] In still other embodiments, wherein the reverse transcription primer binding site sequence is at least 3 nucleotides, at least 4 nucleotides, at least 5 nucleotides, at least 6 nucleotides, at least 7 nucleotides, at least 8 nucleotides, at least 9 nucleotides, at least 10 nucleotides, at least 11 nucleotides, at least 12 nucleotides, at least 13 nucleotides, at least 14 nucleotides, at least 15 nucleotides, at least 16 nucleotides, at least 17 nucleotides, at least 18 nucleotides, at least 19 nucleotides, at least 20 nucleotides, at least 30 nucleotides, at least 40 nucleotides, at least 50 nucleotides, at least 60 nucleotides, at least 70 nucleotides, at least 80 nucleotides, at least 90 nucleotides, at least 100 nucleotides, at least 200 nucleotides, at least 300 nucleotides, at least 400 nucleotides, or at least 500 nucleotides in length.

[0620] In other embodiments, the optional linker or spacer sequence is at least 3 nucleotides, at least 4 nucleotides, at least 5 nucleotides, at least 6 nucleotides, at least 7 nucleotides, at least 8 nucleotides, at least 9 nucleotides, at least 10 nucleotides, at least 11 nucleotides, at least 12 nucleotides, at least 13 nucleotides, at least 14 nucleotides, at least 15 nucleotides, at least 16 nucleotides, at least 17 nucleotides, at least 18 nucleotides, at least 19 nucleotides, at least 20 nucleotides, at least 30 nucleotides, at least 40 nucleotides, at least 50 nucleotides, at least 60 nucleotides, at least 70 nucleotides, at least 80 nucleotides, at least 90 nucleotides, at least 100 nucleotides, at least 200 nucleotides, at least 300 nucleotides, at least 400 nucleotides, or at least 500 nucleotides in length.

[0621] The RT template sequence, in certain embodiments, encodes a single-stranded DNA molecule which is homologous to the non-target strand (and thus, complementary to the corresponding site of the target strand) but includes one or more nucleotide changes. The least one nucleotide change may include one or more single-base nucleotide changes, one or more deletions, and one or more insertions.

[0622] As depicted in FIG. 1G, the synthesized single-stranded DNA product of the RT template sequence is homologous to the non-target strand and contains one or more nucleotide changes. The single-stranded DNA product of the RT template sequence hybridizes in equilibrium with the complementary target strand sequence, thereby displacing the homologous endogenous target strand sequence. The displaced endogenous strand may be referred to in some embodiments as a 5′ endogenous DNA flap species (e.g., see FIG. 1E). This 5′ endogenous DNA flap species can be removed by a 5′ flap endonuclease (e.g., FEN1) and the single-stranded DNA product, now hybridized to the endogenous target strand, may be ligated, thereby creating a mismatch between the endogenous sequence and the newly synthesized strand. The mismatch may be resolved by the cell's innate DNA repair and/or replication processes.

[0623] In various embodiments, the nucleotide sequence of the RT template sequence corresponds to the nucleotide sequence of the non-target strand which becomes displaced as the 5′ flap species and which overlaps with the site to be edited.

[0624] In various embodiments of the extended guide RNAs, the reverse transcription template sequence may encode a single-strand DNA flap that is complementary to an endogenous DNA sequence adjacent to a nick site, wherein the single-strand DNA flap comprises a desired nucleotide change. The single-stranded DNA flap may displace an endogenous single-strand DNA at the nick site. The displaced endogenous single-strand DNA at the nick site can have a 5′ end and form an endogenous flap, which can be excised by the cell. In various embodiments, excision of the 5′ end endogenous flap can help drive product formation since removing the 5′ end endogenous flap encourages hybridization of the single-strand 3′ DNA flap to the corresponding complementary DNA strand, and the incorporation or assimilation of the desired nucleotide change carried by the single-strand 3′ DNA flap into the target DNA.

[0625] In various embodiments of the extended guide RNAs, the cellular repair of the single-strand DNA flap results in installation of the desired nucleotide change, thereby forming a desired product.

[0626] In still other embodiments, the desired nucleotide change is installed in an editing window that is between about −5 to +5 of the nick site, or between about −10 to +10 of the nick site, or between about −20 to +20 of the nick site, or between about −30 to +30 of the nick site, or between about −40 to +40 of the nick site, or between about −50 to +50 of the nick site, or between about −60 to +60 of the nick site, or between about −70 to +70 of the nick site, or between about −80 to +80 of the nick site, or between about −90 to +90 of the nick site, or between about −100 to +100 of the nick site, or between about −200 to +200 of the nick site.

[0627] In other embodiments, the desired nucleotide change is installed in an editing window that is between about +1 to +2 from the nick site, or about +1 to +3, +1 to +4, +1 to +5, +1 to +6, +1 to +7, +1 to +8, +1 to +9, +1 to +10, +1 to +11, +1 to +12, +1 to +13, +1 to +14, +1 to +15, +1 to +16, +1 to +17, +1 to +18, +1 to +19, +1 to +20, +1 to +21, +1 to +22, +1 to +23, +1 to +24, +1 to +25, +1 to +26, +1 to +27, +1 to +28, +1 to +29, +1 to +30, +1 to +31, +1 to +32, +1 to +33, +1 to +34, +1 to +35, +1 to +36, +1 to +37, +1 to +38, +1 to +39, +1 to +40, +1 to +41, +1 to +42, +1 to +43, +1 to +44, +1 to +45, +1 to +46, +1 to +47, +1 to +48, +1 to +49, +1 to +50, +1 to +51, +1 to +52, +1 to +53, +1 to +54, +1 to +55, +1 to +56, +1 to +57, +1 to +58, +1 to +59, +1 to +60, +1 to +61, +1 to +62, +1 to +63, +1 to +64, +1 to +65, +1 to +66, +1 to +67, +1 to +68, +1 to +69, +1 to +70, +1 to +71, +1 to +72, +1 to +73, +1 to +74, +1 to +75, +1 to +76, +1 to +77, +1 to +78, +1 to +79, +1 to +80, +1 to +81, +1 to +82, +1 to +83, +1 to +84, +1 to +85, +1 to +86, +1 to +87, +1 to +88, +1 to +89, +1 to +90, +1 to +90, +1 to +91, +1 to +92, +1 to +93, +1 to +94, +1 to +95, +1 to +96, +1 to +97, +1 to +98, +1 to +99, +1 to +100, +1 to +101, +1 to +102, +1 to +103, +1 to +104, +1 to +105, +1 to +106, +1 to +107, +1 to +108, +1 to +109, +1 to +110, +1 to +111, +1 to +112, +1 to +113, +1 to +114, +1 to +115, +1 to +116, +1 to +117, +1 to +118, +1 to +119, +1 to +120, +1 to +121, +1 to +122, +1 to +123, +1 to +124, or +1 to +125 from the nick site.

[0628] In still other embodiments, the desired nucleotide change is installed in an editing window that is between about +1 to +2 from the nick site, or about +1 to +5, +1 to +10, +1 to +15, +1 to +20, +1 to +25, +1 to +30, +1 to +35, +1 to +40, +1 to +45, +1 to +50, +1 to +55, +1 to +100, +1 to +105, +1 to +110, +1 to +115, +1 to +120, +1 to +125, +1 to +130, +1 to +135, +1 to +140, +1 to +145, +1 to +150, +1 to +155, +1 to +160, +1 to +165, +1 to +170, +1 to +175, +1 to +180, +1 to +185, +1 to +190, +1 to +195, or +1 to +200, from the nick site.

[0629] In various aspects, the extended guide RNAs are modified versions of a guide RNA. Guide RNAs maybe naturally occurring, expressed from an encoding nucleic acid, or synthesized chemically. Methods are well known in the art for obtaining or otherwise synthesizing guide RNAs and for determining the appropriate sequence of the guide RNA, including the protospacer sequence which interacts and hybridizes with the target strand of a genomic target site of interest.

[0630] In various embodiments, the particular design aspects of a guide RNA sequence will depend upon the nucleotide sequence of a genomic target site of interest (i.e., the desired site to be edited) and the type of napDNAbp (e.g., Cas9 protein) present in prime editing systems described herein, among other factors, such as PAM sequence locations, percent G/C content in the target sequence, the degree of microhomology regions, secondary structures, etc.

[0631] In general, a guide sequence is any polynucleotide sequence having sufficient complementarity with a target polynucleotide sequence to hybridize with the target sequence and direct sequence-specific binding of a napDNAbp (e.g., a Cas9, Cas9 homolog, or Cas9 variant) to the target sequence. In some embodiments, the degree of complementarity between a guide sequence and its corresponding target sequence, when optimally aligned using a suitable alignment algorithm, is about or more than about 50%, 60%, 75%, 80%, 85%, 90%, 95%, 97.5%, 99%, or more. Optimal alignment may be determined with the use of any suitable algorithm for aligning sequences, non-limiting example of which include the Smith-Waterman algorithm, the Needleman-Wunsch algorithm, algorithms based on the Burrows-Wheeler Transform (e.g., the Burrows Wheeler Aligner), ClustalW, Clustal X, BLAT, Novoalign (Novocraft Technologies, ELAND (Illumina, San Diego, Calif.), SOAP (available at soap.genomics.org.cn), and Maq (available at maq.sourceforge.net). In some embodiments, a guide sequence is about or more than about 5, 10, 11, 12, 13, 14, 15, 16, 17, 18, 19, 20, 21, 22, 23, 24, 25, 26, 27, 28, 29, 30, 35, 40, 45, 50, 75, or more nucleotides in length.

[0632] In some embodiments, a guide sequence is less than about 75, 50, 45, 40, 35, 30, 25, 20, 15, 12, or fewer nucleotides in length. The ability of a guide sequence to direct sequence-specific binding of a prime editor (PE) to a target sequence may be assessed by any suitable assay. For example, the components of a prime editor (PE), including the guide sequence to be tested, may be provided to a host cell having the corresponding target sequence, such as by transfection with vectors encoding the components of a prime editor (PE) disclosed herein, followed by an assessment of preferential cleavage within the target sequence, such as by Surveyor assay as described herein. Similarly, cleavage of a target polynucleotide sequence may be evaluated in a test tube by providing the target sequence, components of a prime editor (PE), including the guide sequence to be tested and a control guide sequence different from the test guide sequence, and comparing binding or rate of cleavage at the target sequence between the test and control guide sequence reactions. Other assays are possible, and will occur to those skilled in the art.

[0633] A guide sequence may be selected to target any target sequence. In some embodiments, the target sequence is a sequence within a genome of a cell. Exemplary target sequences include those that are unique in the target genome. For example, for the S. pyogenes Cas9, a unique target sequence in a genome may include a Cas9 target site of the form MMMMMMMMNNNNNNNNNNNNXGG (SEQ ID NO: 204) where NNNNNNNNNNNNXGG (SEQ ID NO: 205) (N is A, G, T, or C; and X can be anything). A unique target sequence in a genome may include an S. pyogenes Cas9 target site of the form MMMMMMMMMNNNNNNNNNNNXGG (SEQ ID NO: 206) where NNNNNNNNNNNXGG (SEQ ID NO: 207) (N is A, G, T, or C; and X can be anything). For the S. thermophilus CRISPR1Cas9, a unique target sequence in a genome may include a Cas9 target site of the form MMMMMMMMNNNNNNNNNNNNXXAGAAW (SEQ ID NO: 208) where NNNNNNNNNNNNXXAGAAW (SEQ ID NO: 209) (N is A, G, T, or C; X can be anything; and W is A or T). A unique target sequence in a genome may include an S. thermophilus CRISPR 1 Cas9 target site of the form MMMMMMMMMNNNNNNNNNNNXXAGAAW (SEQ ID NO: 210) where NNNNNNNNNNNXXAGAAW (SEQ ID NO: 211) (N is A, G, T, or C; X can be anything; and W is A or T). For the S. pyogenes Cas9, a unique target sequence in a genome may include a Cas9 target site of the form MMMMMMMMNNNNNNNNNNNNXGGXG (SEQ ID NO: 212) where NNNNNNNNNNNNXGGXG (SEQ ID NO: 213) (N is A, G, T, or C; and X can be anything). A unique target sequence in a genome may include an S. pyogenes Cas9 target site of the form MMMMMMMMMNNNNNNNNNNNXGGXG (SEQ ID NO: 214) where NNNNNNNNNNNXGGXG (SEQ ID NO: 215) (N is A, G, T, or C; and X can be anything). In each of these sequences “M” may be A, G, T, or C, and need not be considered in identifying a sequence as unique.

[0634] In some embodiments, a guide sequence is selected to reduce the degree of secondary structure within the guide sequence. Secondary structure may be determined by any suitable polynucleotide folding algorithm. Some programs are based on calculating the minimal Gibbs free energy. An example of one such algorithm is mFold, as described by Zuker and Stiegler (Nucleic Acids Res. 9 (1981), 133-148). Another example folding algorithm is the online webserver RNAfold, developed at Institute for Theoretical Chemistry at the University of Vienna, using the centroid structure prediction algorithm (see e.g. A. R. Gruber et al., 2008, Cell 106(1): 23-24; and PA Carr and GM Church, 2009, Nature Biotechnology 27(12): 1151-62). Further algorithms may be found in U.S. application Ser. No. 61/836,080; Broad Reference BI-2013/004A); incorporated herein by reference.

[0635] In general, a tracr mate sequence includes any sequence that has sufficient complementarity with a tracr sequence to promote one or more of: (1) excision of a guide sequence flanked by tracr mate sequences in a cell containing the corresponding tracr sequence; and (2) formation of a complex at a target sequence, wherein the complex comprises the tracr mate sequence hybridized to the tracr sequence. In general, degree of complementarity is with reference to the optimal alignment of the tracr mate sequence and tracr sequence, along the length of the shorter of the two sequences. Optimal alignment may be determined by any suitable alignment algorithm, and may further account for secondary structures, such as self-complementarity within either the tracr sequence or tracr mate sequence. In some embodiments, the degree of complementarity between the tracr sequence and tracr mate sequence along the length of the shorter of the two when optimally aligned is about or more than about 25%, 30%, 40%, 50%, 60%, 70%, 80%, 90%, 95%, 97.5%, 99%, or higher. In some embodiments, the tracr sequence is about or more than about 5, 6, 7, 8, 9, 10, 11, 12, 13, 14, 15, 16, 17, 18, 19, 20, 25, 30, 40, 50, or more nucleotides in length. In some embodiments, the tracr sequence and tracr mate sequence are contained within a single transcript, such that hybridization between the two produces a transcript having a secondary structure, such as a hairpin. Preferred loop forming sequences for use in hairpin structures are four nucleotides in length, and most preferably have the sequence GAAA. However, longer or shorter loop sequences may be used, as may alternative sequences. The sequences preferably include a nucleotide triplet (for example, AAA), and an additional nucleotide (for example C or G). Examples of loop forming sequences include CAAA and AAAG. In an embodiment of the invention, the transcript or transcribed polynucleotide sequence has at least two or more hairpins. In preferred embodiments, the transcript has two, three, four or five hairpins. In a further embodiment of the invention, the transcript has at most five hairpins. In some embodiments, the single transcript further includes a transcription termination sequence; preferably this is a polyT sequence, for example six T nucleotides. Further non-limiting examples of single polynucleotides comprising a guide sequence, a tracr mate sequence, and a tracr sequence are as follows (listed 5′ to 3′), where “N” represents a base of a guide sequence, the first block of lower case letters represent the tracr mate sequence, and the second block of lower case letters represent the tracr sequence, and the final poly-T sequence represents the transcription terminator:

(1)
(SEQ ID NO: 216)
NNNNNNNNGTTTTTGTACTCTCAAGATTTAGAAATAAATCTTGCAGAAGC
TACAAAGATAAGGCTTCATGCCGAAATCAACACCCTGTCATTTTATGGCA
GGGTGTTTTCGTTATTTAATTTTTT;
(2)
(SEQ ID NO: 217)
NNNNNNNNNNNNNNNNNNGTTTTTGTACTCTCAGAAATGCAGAAGCTACA
AAGATAAGGCTTCATGCCGAAATCAACACCCTGTCATTTTATGGCAGGGT
GTTTTCGTTATTTAATTTTTT;
(3)
(SEQ ID NO: 218)
NNNNNNNNNNNNNNNNNNNNGTTTTTGTACTCTCAGAAATGCAGAAGCTA
CAAAGATAAGGCTTCATGCCGAAATCAACACCCTGTCATTTTATGGCAGG
GTGTTTTTT;
(4)
(SEQ ID NO: 219)
NNNNNNNNNNNNNNNNNNNNGTTTTAGAGCTAGAAATAGCAAGTTAAAAT
AAGGCTAGTCCGTTATCAACTTGAAAAAGTGGCACCGAGTCGGTGCTTTT
TT;
(5)
(SEQ ID NO: 220)
NNNNNNNNNNNNNNNNNNNNGTTTTAGAGCTAGAAATAGCAAGTTAAAAT
AAGGCTAGTCCGTTATCAACTTGAAAAAGTGTTTTTTT;
AND
(6)
(SEQ ID NO: 221)
NNNNNNNNNNNNNNNNNNNNGTTTTAGAGCTAGAAATAGCAAGTTAAAAT
AAGGCTAGTCCGTTATCATTTTTTTT.

[0636] In some embodiments, sequences (1) to (3) are used in combination with Cas9 from S. thermophilus CRISPR1. In some embodiments, sequences (4) to (6) are used in combination with Cas9 from S. pyogenes. In some embodiments, the tracr sequence is a separate transcript from a transcript comprising the tracr mate sequence.

[0637] It will be apparent to those of skill in the art that in order to target any of the fusion proteins comprising a Cas9 domain and a single-stranded DNA binding protein, as disclosed herein, to a target site, e.g., a site comprising a point mutation to be edited, it is typically necessary to co-express the fusion protein together with a guide RNA, e.g., an sgRNA. As explained in more detail elsewhere herein, a guide RNA typically comprises a tracrRNA framework allowing for Cas9 binding, and a guide sequence, which confers sequence specificity to the Cas9:nucleic acid editing enzyme/domain fusion protein.

[0638] In some embodiments, the guide RNA comprises a structure 5′-[guide sequence]-GUUUUAGAGCUAGAAAUAGCAAGUUAAAAUAAAGGCUAGUCCGUUAUCAACU UGAAAAAGUGGCACCGAGUCGGUGCUUUUU-3′ (SEQ ID NO: 222), wherein the guide sequence comprises a sequence that is complementary to the target sequence. The guide sequence is typically 20 nucleotides long. The sequences of suitable guide RNAs for targeting Cas9:nucleic acid editing enzyme/domain fusion proteins to specific genomic target sites will be apparent to those of skill in the art based on the instant disclosure. Such suitable guide RNA sequences typically comprise guide sequences that are complementary to a nucleic sequence within 50 nucleotides upstream or downstream of the target nucleotide to be edited. Some exemplary guide RNA sequences suitable for targeting any of the provided fusion proteins to specific target sequences are provided herein. Additional guide sequences are well known in the art and can be used with the prime editor (PE) described herein.

[0639] In other embodiments, the PEgRNAs include those depicted in FIG. 3D.

[0640] In still other embodiments, the PEgRNAs may include those depicted in FIG. 3E.

[0641] FIG. 3D provides the structure of an embodiment of a PEgRNA contemplated herein and which may be designed in accordance with the methodology defined in Example 2. The PEgRNA comprises three main component elements ordered in the 5′ to 3′ direction, namely: a spacer, a gRNA core, and an extension arm at the 3′ end. The extension arm may further be divided into the following structural elements in the 5′ to 3′ direction, namely: a primer binding site (A), an edit template (B), and a homology arm (C). In addition, the PEgRNA may comprise an optional 3′ end modifier region (e1) and an optional 5′ end modifier region (e2). Still further, the PEgRNA may comprise a transcriptional termination signal at the 3′ end of the PEgRNA (not depicted). These structural elements are further defined herein. The depiction of the structure of the PEgRNA is not meant to be limiting and embraces variations in the arrangement of the elements. For example, the optional sequence modifiers (e1) and (e2) could be positioned within or between any of the other regions shown, and not limited to being located at the 3′ and 5′ ends.

[0642] FIG. 3E provides the structure of another embodiment of a PEgRNA contemplated herein and which may be designed in accordance with the methodology defined in Example 2. The PEgRNA comprises three main component elements ordered in the 5′ to 3′ direction, namely: a spacer, a gRNA core, and an extension arm at the 3′ end. The extension arm may further be divided into the following structural elements in the 5′ to 3′ direction, namely: a primer binding site (A), an edit template (B), and a homology arm (C). In addition, the PEgRNA may comprise an optional 3′ end modifier region (e1) and an optional 5′ end modifier region (e2). Still further, the PEgRNA may comprise a transcriptional termination signal on the 3′ end of the PEgRNA (not depicted). These structural elements are further defined herein. The depiction of the structure of the PEgRNA is not meant to be limiting and embraces variations in the arrangement of the elements. For example, the optional sequence modifiers (e1) and (e2) could be positioned within or between any of the other regions shown, and not limited to being located at the 3′ and 5′ ends.

[0643] PEgRNA Improvements

[0644] The PEgRNAs may also include additional design improvements that may modify the properties and/or characteristics of PEgRNAs thereby improving the efficacy of prime editing. In various embodiments, these improvements may belong to one or more of a number of different categories, including but not limited to: (1) designs to enable efficient expression of functional PEgRNAs from non-polymerase III (pol III) promoters, which would enable the expression of longer PEgRNAs without burdensome sequence requirements; (2) improvements to the core, Cas9-binding PEgRNA scaffold, which could improve efficacy; (3) modifications to the PEgRNA to improve RT processivity, enabling the insertion of longer sequences at targeted genomic loci; and (4) addition of RNA motifs to the 5′ or 3′ termini of the PEgRNA that improve PEgRNA stability, enhance RT processivity, prevent misfolding of the PEgRNA, or recruit additional factors important for genome editing.

[0645] In one embodiment, PEgRNA could be designed with polIII promoters to improve the expression of longer-length PEgRNA with larger extension arms. sgRNAs are typically expressed from the U6 snRNA promoter. This promoter recruits pol III to express the associated RNA and is useful for expression of short RNAs that are retained within the nucleus. However, pol III is not highly processive and is unable to express RNAs longer than a few hundred nucleotides in length at the levels required for efficient genome editing. Additionally, pol III can stall or terminate at stretches of U's, potentially limiting the sequence diversity that could be inserted using a PEgRNA. Other promoters that recruit polymerase II (such as pCMV) or polymerase I (such as the U1 snRNA promoter) have been examined for their ability to express longer sgRNAs. However, these promoters are typically partially transcribed, which would result in extra sequence 5′ of the spacer in the expressed PEgRNA, which has been shown to result in markedly reduced Cas9:sgRNA activity in a site-dependent manner. Additionally, while pol III-transcribed PEgRNAs can simply terminate in a run of 6-7 U's, PEgRNAs transcribed from pol II or pol I would require a different termination signal. Often such signals also result in polyadenylation, which would result in undesired transport of the PEgRNA from the nucleus. Similarly, RNAs expressed from pol II promoters such as pCMV are typically 5′-capped, also resulting in their nuclear export.

[0646] Previously, Rinn and coworkers screened a variety of expression platforms for the production of long-noncoding RNA-(lncRNA) tagged sgRNAs¹⁸³. These platforms include RNAs expressed from pCMV and that terminate in the ENE element from the MALAT1 ncRNA from humans¹⁸⁴, the PAN ENE element from KSHV¹⁸⁵, or the 3′ box from U1 snRNA¹⁸⁶. Notably, the MALAT1 ncRNA and PAN ENEs form triple helices protecting the polyA-tail^{184, 187}. These constructs could also enhance RNA stability. It is contemplated that these expression systems will also enable the expression of longer PEgRNAs.

[0647] In addition, a series of methods have been designed for the cleavage of the portion of the pol II promoter that would be transcribed as part of the PEgRNA, adding either a self-cleaving ribozyme such as the hammerhead¹⁸⁸, pistol¹⁸⁹, hatchet¹⁸⁹, hairpin¹⁹⁰, VS¹⁹¹, twister¹⁹², or twister sister¹⁹² ribozymes, or other self-cleaving elements to process the transcribed guide, or a hairpin that is recognized by Csy4¹⁹³ and also leads to processing of the guide. Also, it is hypothesized that incorporation of multiple ENE motifs could lead to improved PEgRNA expression and stability, as previously demonstrated for the KSHV PAN RNA and element¹⁸⁵. It is also anticipated that circularizing the PEgRNA in the form of a circular intronic RNA (ciRNA) could also lead to enhanced RNA expression and stability, as well as nuclear localization¹⁹⁴.

[0648] In various embodiments, the PEgRNA may include various above elements, as exemplified by the following sequence.

Non-limiting example 1 - PEgRNA expression platform consisting
of pCMV, Csy4 hairpin, the PEgRNA, and MALAT1 ENE
(SEQ ID NO: 223)
TAGTTATTAATAGTAATCAATTACGGGGTCATTAGTTCATAGCCCATATATGGAGTTC
CGCGTTACATAACTTACGGTAAATGGCCCGCCTGGCTGACCGCCCAACGACCCCC
GCCCATTGACGTCAATAATGACGTATGTTCCCATAGTAACGCCAATAGGGACTTTCC
ATTGACGTCAATGGGTGGAGTATTTACGGTAAACTGCCCACTTGGCAGTACATCAA
GTGTATCATATGCCAAGTACGCCCCCTATTGACGTCAATGACGGTAAATGGCCCGC
CTGGCATTATGCCCAGTACATGACCTTATGGGACTTTCCTACTTGGCAGTACATCTA
CGTATTAGTCATCGCTATTACCATGGTGATGCGGTTTTGGCAGTACATCAATGGGCG
TGGATAGCGGTTTGACTCACGGGGATTTCCAAGTCTCCACCCCATTGACGTCAATG
GGAGTTTGTTTTGGCACCAAAATCAACGGGACTTTCCAAAATGTCGTAACAACTC
CGCCCCATTGACGCAAATGGGCGGTAGGCGTGTACGGTGGGAGGTCTATATAAGC
AGAGCTGGTTTAGTGAACCGTCAGATCGTTCACTGCCGTATAGGCAGGGCCCAGA
CTGAGCACGTGAGTTTTAGAGCTAGAAATAGCAAGTTAAAATAAGGCTAGTCCGT
TATCAACTTGAAAAAGTGGGACCGAGTCGGTCCTCTGCCATCAAAGCGTGCTCAG
TCTGTTTTAGGGTCATGAAGGTTTTTCTTTTCCTGAGAAAACAACACGTATTGTTTT
CTCAGGTTTTGCTTTTTGGCCTTTTTCTAGCTTAAAAAAAAAAAAAGCAAAAGAT
GCTGGTGGTTGGCACTCCTGGTTTCCAGGACGGGGTTCAAATCCCTGCGGCGTCT
TTGCTTTGACT
Non-limiting example 2-PEgRNA expression platform consisting
of pCMV, Csy4 hairing, the PEgRNA, and PAN ENE
(SEQ ID NO: 224)
TAGTTATTAATAGTAATCAATTACGGGGTCATTAGTTCATAGCCCATATATGGAGTTC
CGCGTTACATAACTTACGGTAAATGGCCCGCCTGGCTGACCGCCCAACGACCCCC
GCCCATTGACGTCAATAATGACGTATGTTCCCATAGTAACGCCAATAGGGACTTTCC
ATTGACGTCAATGGGTGGAGTATTTACGGTAAACTGCCCACTTGGCAGTACATCAA
GTGTATCATATGCCAAGTACGCCCCCTATTGACGTCAATGACGGTAAATGGCCCGC
CTGGCATTATGCCCAGTACATGACCTTATGGGACTTTCCTACTTGGCAGTACATCTA
CGTATTAGTCATCGCTATTACCATGGTGATGCGGTTTTGGCAGTACATCAATGGGCG
TGGATAGCGGTTTGACTCACGGGGATTTCCAAGTCTCCACCCCATTGACGTCAATG
GGAGTTTGTTTTGGCACCAAAATCAACGGGACTTTCCAAAATGTCGTAACAACTC
CGCCCCATTGACGCAAATGGGCGGTAGGCGTGTACGGTGGGAGGTCTATATAAGC
AGAGCTGGTTTAGTGAACCGTCAGATCGTTCACTGCCGTATAGGCAGGGCCCAGA
CTGAGCACGTGAGTTTTAGAGCTAGAAATAGCAAGTTAAAATAAGGCTAGTCCGT
TATCAACTTGAAAAAGTGGGACCGAGTCGGTCCTCTGCCATCAAAGCGTGCTCAG
TCTGTTTTGTTTTGGCTGGGTTTTTCCTTGTTCGCACCGGACACCTCCAGTGACCA
GACGGCAAGGTTTTTATCCCAGTGTATATTGGAAAAACATGTTATACTTTTGACAAT
TTAACGTGCCTAGAGCTCAAATTAAACTAATACCATAACGTAATGCAACTTACAAC
ATAAATAAAGGTCAATGTTTAATCCATAAAAAAAAAAAAAAAAAAA
Non-limiting example 3 - PEgRNA expression platform consisting
of pCMV, Csy4 hairing, the PEgRNA, and 3xPAN ENE
(SEQ ID NO: 225)
TAGTTATTAATAGTAATCAATTACGGGGTCATTAGTTCATAGCCCATATATGGAGTTC
CGCGTTACATAACTTACGGTAAATGGCCCGCCTGGCTGACCGCCCAACGACCCCC
GCCCATTGACGTCAATAATGACGTATGTTCCCATAGTAACGCCAATAGGGACTTTCC
ATTGACGTCAATGGGTGGAGTATTTACGGTAAACTGCCCACTTGGCAGTACATCAA
GTGTATCATATGCCAAGTACGCCCCCTATTGACGTCAATGACGGTAAATGGCCCGC
CTGGCATTATGCCCAGTACATGACCTTATGGGACTTTCCTACTTGGCAGTACATCTA
CGTATTAGTCATCGCTATTACCATGGTGATGCGGTTTTGGCAGTACATCAATGGGCG
TGGATAGCGGTTTGACTCACGGGGATTTCCAAGTCTCCACCCCATTGACGTCAATG
GGAGTTTGTTTTGGCACCAAAATCAACGGGACTTTCCAAAATGTCGTAACAACTC
CGCCCCATTGACGCAAATGGGCGGTAGGCGTGTACGGTGGGAGGTCTATATAAGC
AGAGCTGGTTTAGTGAACCGTCAGATCGTTCACTGCCGTATAGGCAGGGCCCAGA
CTGAGCACGTGAGTTTTAGAGCTAGAAATAGCAAGTTAAAATAAGGCTAGTCCGT
TATCAACTTGAAAAAGTGGGACCGAGTCGGTCCTCTGCCATCAAAGCGTGCTCAG
TCTGTTTTGTTTTGGCTGGGTTTTTCCTTGTTCGCACCGGACACCTCCAGTGACCA
GACGGCAAGGTTTTTATCCCAGTGTATATTGGAAAAACATGTTATACTTTTGACAAT
TTAACGTGCCTAGAGCTCAAATTAAACTAATACCATAACGTAATGCAACTTACAAC
ATAAATAAAGGTCAATGTTTAATCCATAAAAAAAAAAAAAAAAAAAACACACTGT
TTTGGCTGGGTTTTTCCTTGTTCGCACCGGACACCTCCAGTGACCAGACGGCAAG
GTTTTTATCCCAGTGTATATTGGAAAAACATGTTATACTTTTGACAATTTAACGTGC
CTAGAGCTCAAATTAAACTAATACCATAACGTAATGCAACTTACAACATAAATAAA
GGTCAATGTTTAATCCATAAAAAAAAAAAAAAAAAAATCTCTCTGTTTTGGCTGG
GTTTTTCCTTGTTCGCACCGGACACCTCCAGTGACCAGACGGCAAGGTTTTTATCC
CAGTGTATATTGGAAAAACATGTTATACTTTTGACAATTTAACGTGCCTAGAGCTCA
AATTAAACTAATACCATAACGTAATGCAACTTACAACATAAATAAAGGTCAATGTTT
AATCCATAAAAAAAAAAAAAAAAAAA
Non-limiting example 4 - PEgRNA expression platform consisting
of pCMV, Csy4 hairing, the PEgRNA, and 3′box
(SEQ ID NO: 226)
TAGTTATTAATAGTAATCAATTACGGGGTCATTAGTTCATAGCCCATATATGGAGTTC
CGCGTTACATAACTTACGGTAAATGGCCCGCCTGGCTGACCGCCCAACGACCCCC
GCCCATTGACGTCAATAATGACGTATGTTCCCATAGTAACGCCAATAGGGACTTTCC
ATTGACGTCAATGGGTGGAGTATTTACGGTAAACTGCCCACTTGGCAGTACATCAA
GTGTATCATATGCCAAGTACGCCCCCTATTGACGTCAATGACGGTAAATGGCCCGC
CTGGCATTATGCCCAGTACATGACCTTATGGGACTTTCCTACTTGGCAGTACATCTA
CGTATTAGTCATCGCTATTACCATGGTGATGCGGTTTTGGCAGTACATCAATGGGCG
TGGATAGCGGTTTGACTCACGGGGATTTCCAAGTCTCCACCCCATTGACGTCAATG
GGAGTTTGTTTTGGCACCAAAATCAACGGGACTTTCCAAAATGTCGTAACAACTC
CGCCCCATTGACGCAAATGGGCGGTAGGCGTGTACGGTGGGAGGTCTATATAAGC
AGAGCTGGTTTAGTGAACCGTCAGATCGTTCACTGCCGTATAGGCAGGGCCCAGA
CTGAGCACGTGAGTTTTAGAGCTAGAAATAGCAAGTTAAAATAAGGCTAGTCCGT
TATCAACTTGAAAAAGTGGGACCGAGTCGGTCCTCTGCCATCAAAGCGTGCTCAG
TCTGTTTGTTTCAAAAGTAGACTGTACGCTAAGGGTCATATCTTTTTTTGTTTGGTT
TGTGTCTTGGTTGGCGTCTTAAA
Non-limiting example 5 - PEgRNA expression platform consisting
of pU1, Csy4 hairping, the PEgRNA, and 3′box
(SEQ ID NO: 227)
CTAAGGACCAGCTTCTTTGGGAGAGAACAGACGCAGGGGCGGGAGGGAAAAAG
GGAGAGGCAGACGTCACTTCCCCTTGGCGGCTCTGGCAGCAGATTGGTCGGTTGA
GTGGCAGAAAGGCAGACGGGGACTGGGCAAGGCACTGTCGGTGACATCACGGAC
AGGGCGACTTCTATGTAGATGAGGCAGCGCAGAGGCTGCTGCTTCGCCACTTGCT
GCTTCACCACGAAGGAGTTCCCGTGCCCTGGGAGCGGGTTCAGGACCGCTGATCG
GAAGTGAGAATCCCAGCTGTGTGTCAGGGCTGGAAAGGGCTCGGGAGTGCGCGG
GGCAAGTGACCGTGTGTGTAAAGAGTGAGGCGTATGAGGCTGTGTCGGGGCAGA
GGCCCAAGATCTCAGTTCACTGCCGTATAGGCAGGGCCCAGACTGAGCACGTGAG
TTTTAGAGCTAGAAATAGCAAGTTAAAATAAGGCTAGTCCGTTATCAACTTGAAAA
AGTGGGACCGAGTCGGTCCTCTGCCATCAAAGCGTGCTCAGTCTGTTTCAGCAAG
TTCAGAGAAATCTGAACTTGCTGGATTTTTGGAGCAGGGAGATGGAATAGGAGCT
TGCTCCGTCCACTCCACGCATCGACCTGGTATTGCAGTACCTCCAGGAACGGTGC
ACCCACTTTCTGGAGTTTCAAAAGTAGACTGTACGCTAAGGGTCATATCTTTTTTT
GTTTGGTTTGTGTCTTGGTTGGCGTCTTAAA.

[0649] In various other embodiments, the PEgRNA may be improved by introducing improvements to the scaffold or core sequences. This can be done by introducing known

[0650] The core, Cas9-binding PEgRNA scaffold can likely be improved to enhance PE activity. Several such approaches have already been demonstrated. For instance, the first pairing element of the scaffold (P1) contains a GTTTT-AAAAC (SEQ ID NO: 3939) pairing element. Such runs of Ts have been shown to result in pol III pausing and premature termination of the RNA transcript. Rational mutation of one of the T-A pairs to a G-C pair in this portion of P1 has been shown to enhance sgRNA activity, suggesting this approach would also be feasible for PEgRNAs¹⁹⁵. Additionally, increasing the length of P1 has also been shown to enhance sgRNA folding and lead to improved activity¹⁹⁵, suggesting it as another avenue for the improvement of PEgRNA activity. Example improvements to the core can include:

PEgRNA containing a 6 nt extension to P1
(SEQ ID NO: 228)
GGCCCAGACTGAGCACGTGAGTTTTAGAGCTAGCTCATGAAAATGAGCTA
GCAAGTTAAAATAAGGCTAGTCCGTTATCAACTTGAAAAAGTGGGACCGA
GTCGGTCCTCTGCCATCAAAGCGTGCTCAGTCTGTTTTTTT
PEgRNA containing a T-A to G-C mutation within P1
(SEQ ID NO: 229)
GGCCCAGACTGAGCACGTGAGTTTGAGAGCTAGAAATAGCAAGTTTAAAT
AAGGCTAGTCCGTTATCAACTTGAAAAAGTGGGACCGAGTCGGTCCTCTG
CCATCAAAGCGTGCTCAGTCTGTTTTTTT

[0651] In various other embodiments, the PEgRNA may be improved by introducing modifications to the edit template region. As the size of the insertion templated by the PEgRNA increases, it is more likely to be degraded by endonucleases, undergo spontaneous hydrolysis, or fold into secondary structures unable to be reverse-transcribed by the RT or that disrupt folding of the PEgRNA scaffold and subsequent Cas9-RT binding. Accordingly, it is likely that modification to the template of the PEgRNA might be necessary to affect large insertions, such as the insertion of whole genes. Some strategies to do so include the incorporation of modified nucleotides within a synthetic or semi-synthetic PEgRNA that render the RNA more resistant to degradation or hydrolysis or less likely to adopt inhibitory secondary structures¹⁹⁶. Such modifications could include 8-aza-7-deazaguanosine, which would reduce RNA secondary structure in G-rich sequences; locked-nucleic acids (LNA) that reduce degradation and enhance certain kinds of RNA secondary structure; 2′-O-methyl, 2′-fluoro, or 2′-O-methoxyethoxy modifications that enhance RNA stability. Such modifications could also be included elsewhere in the PEgRNA to enhance stability and activity. Alternatively or additionally, the template of the PEgRNA could be designed such that it both encodes for a desired protein product and is also more likely to adopt simple secondary structures that are able to be unfolded by the RT. Such simple structures would act as a thermodynamic sink, making it less likely that more complicated structures that would prevent reverse transcription would occur. Finally, one could also split the template into two, separate PEgRNAs. In such a design, a PE would be used to initiate transcription and also recruit a separate template RNA to the targeted site via an RNA-binding protein fused to Cas9 or an RNA recognition element on the PEgRNA itself such as the MS2 aptamer. The RT could either directly bind to this separate template RNA, or initiate reverse transcription on the original PEgRNA before swapping to the second template. Such an approach could enable long insertions by both preventing misfolding of the PEgRNA upon addition of the long template and also by not requiring dissociation of Cas9 from the genome for long insertions to occur, which could possibly be inhibiting PE-based long insertions.

[0652] In still other embodiments, the PEgRNA may be improved by introducing additional RNA motifs at the 5′ and 3′ termini of the PEgRNAs, or even at positions therein between (e.g., in the gRNA core region, or the spacer). Several such motifs—such as the PAN ENE from KSHV and the ENE from MALAT1 were discussed above as possible means to terminate expression of longer PEgRNAs from non-pol III promoters. These elements form RNA triple helices that engulf the polyA tail, resulting in their being retained within the nucleus^{184,187} However, by forming complex structures at the 3′ terminus of the PEgRNA that occlude the terminal nucleotide, these structures would also likely help prevent exonuclease-mediated degradation of PEgRNAs.

[0653] Other structural elements inserted at the 3′ terminus could also enhance RNA stability, albeit without enabling termination from non-pol III promoters. Such motifs could include hairpins or RNA quadruplexes that would occlude the 3′ terminus¹⁹⁷, or self-cleaving ribozymes such as HDV that would result in the formation of a 2′-3′-cyclic phosphate at the 3′ terminus and also potentially render the PEgRNA less likely to be degraded by exonucleases¹⁹⁸. Inducing the PEgRNA to cyclize via incomplete splicing—to form a ciRNA—could also increase PEgRNA stability and result in the PEgRNA being retained within the nucleus¹⁹⁴

[0654] Additional RNA motifs could also improve RT processivity or enhance PEgRNA activity by enhancing RT binding to the DNA-RNA duplex. Addition of the native sequence bound by the RT in its cognate retroviral genome could enhance RT activity¹⁹⁹. This could include the native primer binding site (PBS), polypurine tract (PPT), or kissing loops involved in retroviral genome dimerization and initiation of transcription¹⁹⁹.

[0655] Addition of dimerization motifs—such as kissing loops or a GNRA tetraloop/tetraloop receptor pair²⁰⁰—at the 5′ and 3′ termini of the PEgRNA could also result in effective circularization of the PEgRNA, improving stability. Additionally, it is envisioned that addition of these motifs could enable the physical separation of the PEgRNA spacer and primer, prevention occlusion of the spacer which would hinder PE activity. Short 5′ extensions or 3′ extensions to the PEgRNA that form a small toehold hairpin in the spacer region or along the primer binding site could also compete favorably against the annealing of intracomplementary regions along the length of the PEgRNA, e.g., the interaction between the spacer and the primer binding site that can occur. Finally, kissing loops could also be used to recruit other template RNAs to the genomic site and enable swapping of RT activity from one RNA to the other. As exemplary embodiments of various secondary structures, the PEgRNA depicted in FIG. 3D and FIG. 3E list a number secondary RNA structures that may be engineered into any region of the PEgRNA, including in the terminal portions of the extension arm (i.e., eland e2), as shown.

[0656] Example improvements include, but are not limited to:

PEgRNA-HDV fusion
(SEQ ID NO: 230)
GGCCCAGACTGAGCACGTGAGTTTTAGAGCTAGAAATAGCAAGTTAAAATA
AGGCTAGTCCGTTATCAACTTGAAAAAGTGGGACCGAGTCGGTCCTCTGCC
ATCAAAGCGTGCTCAGTCTGGGCCGGCATGGTCCCAGCCTCCTCGCTGGCG
CCGGCTGGGCAACATGCTTCGGCATGGCGAATGGGACTTTTTTT
PEgRNA-MMLV kissing loop
(SEQ ID NO: 231)
GGTGGGAGACGTCCCACCGGCCCAGACTGAGCACGTGAGTTTTAGAGCTAG
AAATAGCAAGTTAAAATAAGGCTAGTCCGTTATCAACTTGAAAAAGTGGGA
CCGAGTCGGTCCTCTGCCATCAAAGCTTCGACCGTGCTCAGTCTGGTGGGA
GACGTCCCACCTTTTTTT
PEgRNA-VS ribozyme kissing loop
(SEQ ID NO: 232)
GAGCAGCATGGCGTCGCTGCTCACGGCCCAGACTGAGCACGTGAGTTTTAG
AGCTAGAAATAGCAAGTTAAAATAAGGCTAGTCCGTTATCAACTTGAAAAA
GTGGGACCGAGTCGGTCCTCTGCCATCAAAGCTTCGACCGTGCTCAGTCTC
CATCAGTTGACACCCTGAGGTTTTTTT
PEgRNA-GNRA tetraloop/tetraloop receptor
(SEQ ID NO: 233)
GCAGACCTAAGTGGUGACATATGGTCTGGGCCCAGACTGAGCACGTGAGTT
TTAGAGCTAUACGTAGCAAGTTAAAATAAGGCTAGTCCGTTATCAACTTUA
CGAAGTGGGACCGAGTCGGTCCTCTGCCATCAAAGCTTCGACCGTGCTCAG
TCTGCATGCGATTAGAAATAATCGCATGTTTTTTT
PEgRNA template switching secondary RNA-HDV fusion
(SEQ ID NO: 234)
TCTGCCATCAAAGCTGCGACCGTGCTCAGTCTGGTGGGAGACGTCCCACCG
GCCGGCATGGTCCCAGCCTCCTCGCTGGCGCCGGCTGGGCAACATGCTTCG
GCATGGCGAATGGGACTTTTTTT

[0657] PEgRNA scaffold could be further improved via directed evolution, in an analogous fashion to how SpCas9 and prime editor (PE) have been improved. Directed evolution could enhance PEgRNA recognition by Cas9 or evolved Cas9 variants. Additionally, it is likely that different PEgRNA scaffold sequences would be optimal at different genomic loci, either enhancing PE activity at the site in question, reducing off-target activities, or both. Finally, evolution of PEgRNA scaffolds to which other RNA motifs have been added would almost certainly improve the activity of the fused PEgRNA relative to the unevolved, fusion RNA. For instance, evolution of allosteric ribozymes composed of c-di-GMP-I aptamers and hammerhead ribozymes led to dramatically improved activity²⁰², suggesting that evolution would improve the activity of hammerhead-PEgRNA fusions as well. In addition, while Cas9 currently does not generally tolerate 5′ extension of the sgRNA, directed evolution will likely generate enabling mutations that mitigate this intolerance, allowing additional RNA motifs to be utilized.

[0658] The present disclosure contemplates any such ways to further improve the efficacy of the prime editing systems disclosed here.

[0659] In various embodiments, it may be advantageous to limit the appearance of consecutive sequence of Ts from the extension arm as consecutive series of T's may limit the capacity of the PEgRNA to be transcribed. For example, strings of at least consecutive three T's, at least consecutive four T's, at least consecutive five T's, at least consecutive six T's, at least consecutive seven T's, at least consecutive eight T's, at least consecutive nine T's, at least consecutive ten T's, at least consecutive eleven T's, at least consecutive twelve T's, at least consecutive thirteen T's, at least consecutive fourteen T's, or at least consecutive fifteen T's should be avoided when designing the PEgRNA, or should be at least removed from the final designed sequence. In one embodiment, one can avoid the includes of unwanted strings of consecutive T's in PEgRNA extension arms but avoiding target sites that are rich in consecutive A:T nucleobase pairs.

[0660] Split PEgRNA Designs for Trans Prime Editing

[0661] The instant disclosure also contemplates trans prime editing, which refers to a modified version of prime editing which operates by separating the PEgRNA into two distinct molecules: a guide RNA and a tPERT molecule. The tPERT molecule is programmed to co-localize with the prime editor complex at a target DNA site, bringing the primer binding site and the DNA synthesis template to the prime editor in trans. For example, see FIG. 3G for an embodiment of a trans prime editor (tPE) which shows a two-component system comprising (1) an recruiting protein (RP)-PE:gRNA complex and (2) a tPERT that includes a primer binding site and a DNA synthesis template joined to an RNA-protein recruitment domain (e.g., stem loop or hairpin), wherein the recruiting protein component of the RP-PE:gRNA complex recruits the tPERT to a target site to be edited, thereby associating the PBS and DNA synthesis template with the prime editor in trans. Said another way, the tPERT is engineered to contain (all or part of) the extension arm of a PEgRNA, which includes the primer binding site and the DNA synthesis template. One advantage of this approach is to separate the extension arm of a PEgRNA from the guide RNA, thereby minimizing annealing interactions that tend to occur between the PBS of the extension arm and the spacer sequence of the guide RNA.

[0662] A key feature of trans prime editing is the ability of the trans prime editor to recruit the tPERT to the site of DNA editing, thereby effectively co-localizing all of the functions of a PEgRNA at the site of prime editing. Recruitment can be achieve by installing an RNA-protein recruitment domain, such as a MS2 aptamer, into the tPERT and fusing a corresponding recruiting protein to the prime editor (e.g., via a linker to the napDNAbp or via a linker to the polymerase) that is capable of specifically binding to the RNA-protein recruitment domain, thereby recruiting the tPERT molecule to the prime editor complex. As depicted in the process described in FIG. 3H, the RP-PE:gRNA complex binds to and nicks the target DNA sequence. Then, the recruiting protein (RP) recruits a tPERT to co-localize to the prime editor complex bound to the DNA target site, thereby allowing the primer binding site, located on the tPERT, to bind to the primer sequence on the nicked strand, and subsequently, allowing the polymerase (e.g., RT) to synthesize a single strand of DNA against the DNA synthesis template, located on the tPERT, up through the 5′ end of the tPERT.

[0663] While the tPERT is shown in FIG. 3G and FIG. 3H as comprising the PBS and DNA synthesis template on the 5′ end of the RNA-protein recruitment domain, the tPERT in other configurations may be designed with the PBS and DNA synthesis template located on the 3′ end of the RNA-protein recruitment domain. However, the tPERT with the 5′ extension has the advantage that synthesis of the single strand of DNA will naturally terminate at the 5′ end of the tPERT and thus, does not risk using any portion of the RNA-protein recruitment domain as a template during the DNA synthesis stage of prime editing.

[0664] PEgRNA Design Method

[0665] The present disclosure also relates to methods for designing PEgRNAs.

[0666] In one aspect of design, the design approach can take into account the particular application for which prime editing is being used. For instance, and as exemplified and discussed herein, prime editing can be used, without limitation, to (a) install mutation-correcting changes to a nucleotide sequence, (b) install protein and RNA tags, (c) install immunoepitopes on proteins of interest, (d) install inducible dimerization domains in proteins, (e) install or remove sequences to alter that activity of a biomolecule, (f) install recombinase target sites to direct specific genetic changes, and (g) mutagenesis of a target sequence by using an error-prone RT. In addition to these methods which, in general, insert, change, or delete nucleotide sequences at target sites of interest, prime editors can also be used to construct highly programmable libraries, as well as to conduct cell data recording and lineage tracing studies. In these various uses, there may be as described herein particular design aspects pertaining to the preparation of a PEgRNA that is particularly useful for any given of these applications.

[0667] When designing a PEgRNA for any particular application or use of prime editing, a number of considerations may be taken into account, which include, but are not limited to:

(a) the target sequence, i.e., the nucleotide sequence in which one or more nucleobase modifications are desired to be installed by the prime editor;
(b) the location of the cut site within the target sequence, i.e., the specific nucleobase position at which the prime editor will induce a single-stand nick to create a 3′ end RT primer sequence on one side of the nick and the 5′ end endogenous flap on the other side of the nick (which ultimately is removed by FEN1 or equivalent thereto and replaced by the 3′ ssDNA flap. The cut site is analogous to the “edit location” since this what creates the 3′ end RT primer sequence which becomes extended by the RT during RNA-depending DNA polymerization to create the 3′ ssDNA flap containing the desired edit, which then replaces the 5′ endogenous DNA flap in the target sequence.
(c) the available PAM sequences (including the canonical SpCas9 PAM sites, as well as non-canonical PAM sites recognized by Cas9 variants and equivalents with expanded or differing PAM specificities);
(d) the spacing between the available PAM sequences and the location of the cut site in the target sequence;
(e) the particular Cas9, Cas9 variant, or Cas9 equivalent of the prime editor being used;
(f) the sequence and length of the primer binding site;
(g) the sequence and length of the edit template;
(h) the sequence and length of the homology arm;
(i) the spacer sequence and length; and
(j) the core sequence.

[0668] The instant disclosure discusses these aspects above.

[0669] In one embodiment, an approach to designing a suitable PEgRNA, and optionally a nicking-sgRNA design guide for second-site nicking, is hereby provided. This embodiment provides a step-by-step set of instructions for designing PEgRNAs and nicking-sgRNAs for prime editing which takes into account one or more of the above considerations. The steps reference the examples shown in FIGS. 70A-70I.
[0670] 1. Define the target sequence and the edit. Retrieve the sequence of the target DNA region (˜200 bp) centered around the location of the desired edit (point mutation, insertion, deletion, or combination thereof). See FIG. 70A.
[0671] 2. Locate target PAMs. Identify PAMs in the proximity to the desired edit location. PAMs can be identified on either strand of DNA proximal to the desired edit location. While PAMs close to the edit position are preferred (i.e., wherein the nick site is less than 30 nt from the edit position, or less than 29 nt, 28 nt, 27 nt, 26 nt, 25 nt, 24 nt, 23 nt, 22 nt, 21 nt, 20 nt, 19 nt, 18 nt, 17 nt, 16 nt, 15 nt, 14 nt, 13 nt, 12 nt, 11 nt, 10 nt, 9 nt, 8 nt, 7 nt, 6 nt, 5 nt, 4 nt, 3 nt, or 2 nt from the edit position to the nick site), it is possible to install edits using protospacers and PAMs that place the nick ≥30 nt from the edit position. See FIG. 70B.
[0672] 3. Locate the nick sites. For each PAM being considered, identify the corresponding nick site and on which strand. For Sp Cas9 H840A nickase, cleavage occurs in the PAM-containing strand between the 3^{rd} and 4^{th} bases 5′ to the NGG PAM. All edited nucleotides must exist 3′ of the nick site, so appropriate PAMs must place the nick 5′ to the target edit on the PAM-containing strand. In the example shown below, there are two possible PAMs. For simplicity, the remaining steps will demonstrate the design of a PEgRNA using PAM 1 only. See FIG. 70C.
[0673] 4. Design the spacer sequence. The protospacer of Sp Cas9 corresponds to the 20 nucleotides 5′ to the NGG PAM on the PAM-containing strand. Efficient Pol III transcription initiation requires a G to be the first transcribed nucleotide. If the first nucleotide of the protospacer is a G, the spacer sequence for the PEgRNA is simply the protospacer sequence. If the first nucleotide of the protospacer is not a G, the spacer sequence of the PEgRNA is G followed by the protospacer sequence. See FIG. 70D.
[0674] 5. Design a primer binding site (PBS). Using the starting allele sequence, identify the DNA primer on the PAM-containing strand. The 3′ end of the DNA primer is the nucleotide just upstream of the nick site (i.e. the 4^{th} base 5′ to the NGG PAM for Sp Cas9). As a general design principle for use with PE2 and PE3, a PEgRNA primer binding site (PBS) containing 12 to 13 nucleotides of complementarity to the DNA primer can be used for sequences that contain ˜40-60% GC content. For sequences with low GC content, longer (14- to 15-nt) PBSs should be tested. For sequences with higher GC content, shorter (8- to 11-nt) PBSs should be tested. Optimal PBS sequences should be determined empirically, regardless of GC content. To design a length-p PBS sequence, take the reverse complement of the first p nucleotides 5′ of the nick site in the PAM-containing strand using the starting allele sequence. See FIG. 70E.
[0675] 6. Design an RT template (or DNA synthesis template). The RT template (or DNA synthesis template where the polymerase is not reverse transcriptase) encodes the designed edit and homology to the sequence adjacent to the edit. In one embodiment, these regions correspond to the DNA synthesis template of FIG. 3D and FIG. 3E, wherein the DNA synthesis template comprises the “edit template” and the “homology arm.” Optimal RT template lengths vary based on the target site. For short-range edits (positions +1 to +6), it is recommended to test a short (9 to 12 nt), a medium (13 to 16 nt), and a long (17 to 20 nt) RT template. For long-range edits (positions +7 and beyond), it is recommended to use RT templates that extend at least 5 nt (preferably 10 or more nt) past the position of the edit to allow for sufficient 3′ DNA flap homology. For long-range edits, several RT templates should be screened to identify functional designs. For larger insertions and deletions (≥5 nt), incorporation of greater 3′ homology (˜20 nt or more) into the RT template is recommended. Editing efficiency is typically impaired when the RT template encodes the synthesis of a G as the last nucleotide in the reverse transcribed DNA product (corresponding to a C in the RT template of the PEgRNA). As many RT templates support efficient prime editing, avoidance of G as the final synthesized nucleotide is recommended when designing RT templates. To design a length-r RT template sequence, use the desired allele sequence and take the reverse complement of the first r nucleotides 3′ of the nick site in the strand that originally contained the PAM. Note that compared to SNP edits, insertion or deletion edits using RT templates of the same length will not contain identical homology. See FIG. 70F.
[0676] 7. Assemble the full PEgRNA sequence. Concatenate the PEgRNA components in the following order (5′ to 3′): spacer, scaffold, RT template and PBS. See FIG. 70G.
[0677] 8. Designing nicking-sgRNAs for PE3. Identify PAMs on the non-edited strand upstream and downstream of the edit. Optimal nicking positions are highly locus-dependent and should be determined empirically. In general, nicks placed 40 to 90 nucleotides 5′ to the position across from the PEgRNA-induced nick lead to higher editing yields and fewer indels. A nicking sgRNA has a spacer sequence that matches the 20-nt protospacer in the starting allele, with the addition of a 5′-G if the protospacer does not begin with a G. See FIG. 70H.
[0678] 9. Designing PE3b nicking-sgRNAs. If a PAM exists in the complementary strand and its corresponding protospacer overlaps with the sequence targeted for editing, this edit could be a candidate for the PE3b system. In the PE3b system, the spacer sequence of the nicking-sgRNA matches the sequence of the desired edited allele, but not the starting allele. The PE3b system operates efficiently when the edited nucleotide(s) falls within the seed region (˜10 nt adjacent to the PAM) of the nicking-sgRNA protospacer. This prevents nicking of the complementary strand until after installation of the edited strand, preventing competition between the PEgRNA and the sgRNA for binding the target DNA. PE3b also avoids the generation of simultaneous nicks on both strands, thus reducing indel formation significantly while maintaining high editing efficiency. PE3b sgRNAs should have a spacer sequence that matches the 20-nt protospacer in the desired allele, with the addition of a 5′ G if needed. See FIG. 70I.

[0679] The above step-by-step process for designing a suitable PEgRNA and a second-site nicking sgRNA is not meant to be limiting in any way. The disclosure contemplates variations of the above-described step-by-step process which would be derivable therefrom by a person of ordinary skill in the art.

### [7] Applications Utilizing Prime Editing

[0680] In addition to the development of the prime editing system described herein as a new “search-and-replace” genome editing technology that mediates targeted insertions, deletions, and all 12 possible base-to-base conversions at targeted loci in human cells without requiring double-stranded DNA breaks, or donor DNA templates, the inventors have also contemplated the use of the prime editors in a wide-array of specific applications. For example, and as exemplified and discussed herein, prime editing can be used to (a) install mutation-correcting changes to a nucleotide sequence, (b) install protein and RNA tags, (c) installation of immunoepitopes on proteins of interest, (d) install inducible dimerization domains in proteins, (e) install or remove sequences to alter that activity of a biomolecule, (f) install recombinase target sites to direct specific genetic changes, and (g) mutagenesis of a target sequence by using an error-prone RT. In addition to these methods which, in general, insert, change, or delete nucleotide sequences at target sites of interest, prime editors can also be used to construct highly programmable libraries, as well as to conduct cell data recording and lineage tracing studies. The inventors have also contemplated additional design features of PEgRNAs that are aimed to improve the efficacy of prime editing. Still further, the inventors have conceived of methods for successfully delivering prime editors using vector delivery systems and which involve splitting the napDNAbp using intein domains.

[0681] These specific exemplary uses of prime editing are in no way intended to be limiting. The present Application contemplates any use for prime editing which involves, in general, some form of the installation, removal, and/or modification of one or more nucleobases at a target site in a nucleotide sequence, e.g., a genomic DNA.

[0682] For any of the exemplified uses for prime editing, one may use any prime editor disclosed herein, including PE1, PE2, PE3, and PE3b, or PE-short.

[0683] A. Prime Editing Mechanism

[0684] In various embodiments, prime editing (or “prime editing”) operates by contacting a target DNA molecule (for which a change in the nucleotide sequence is desired to be introduced) with a nucleic acid programmable DNA binding protein (napDNAbp) complexed with an extended guide RNA. In reference to FIG. 1G, the extended guide RNA comprises an extension at the 3′ or 5′ end of the guide RNA, or at an intramolecular location in the guide RNA and encodes the desired nucleotide change (e.g., single nucleotide change, insertion, or deletion). In step (a), the napDNAbp/extended gRNA complex contacts the DNA molecule and the extended gRNA guides the napDNAbp to bind to a target locus. In step (b), a nick in one of the strands of DNA of the target locus is introduced (e.g., by a nuclease or chemical agent), thereby creating an available 3′ end in one of the strands of the target locus. In certain embodiments, the nick is created in the strand of DNA that corresponds to the R-loop strand, i.e., the strand that is not hybridized to the guide RNA sequence, i.e., the “non-target strand.” The nick, however, could be introduced in either of the strands. That is, the nick could be introduced into the R-loop “target strand” (i.e., the strand hybridized to the protospacer sequence of the extended gRNA) or the “non-target strand” (i.e, the strand forming the single-stranded portion of the R-loop and which is complementary to the target strand). In step (c), the 3′ end of the DNA strand (formed by the nick) interacts with the extended portion of the guide RNA in order to prime reverse transcription (i.e, “target-primed RT”). In certain embodiments, the 3′ end DNA strand hybridizes to a specific RT priming sequence on the extended portion of the guide RNA, i.e, the “reverse transcriptase priming sequence.” In step (d), a reverse transcriptase is introduced (as a fusion protein with the napDNAbp or in trans) which synthesizes a single strand of DNA from the 3′ end of the primed site towards the 5′ end of the extended guide RNA. This forms a single-strand DNA flap comprising the desired nucleotide change (e.g., the single base change, insertion, or deletion, or a combination thereof) and which is otherwise homologous to the endogenous DNA at or adjacent to the nick site. In step (e), the napDNAbp and guide RNA are released. Steps (f) and (g) relate to the resolution of the single strand DNA flap such that the desired nucleotide change becomes incorporated into the target locus. This process can be driven towards the desired product formation by removing the corresponding 5′ endogenous DNA flap (e.g., by FEN1 or similar enzyme that is provide in trans, as a fusion with the prime editor, or endogenously provided) that forms once the 3′ single strand DNA flap invades and hybridizes to the endogenous DNA sequence. Without being bound by theory, the cells endogenous DNA repair and replication processes resolves the mismatched DNA to incorporate the nucleotide change(s) to form the desired altered product. The process can also be driven towards product formation with “second strand nicking,” as exemplified in FIG. 1G, or “termporal second strand nicking,” as exemplified in FIG. 1I and discussed herein.

[0685] The process of prime editing may introduce at least one or more of the following genetic changes: transversions, transitions, deletions, and insertions. In addition, prime editing may be implemented for specific applications. For example, and as exemplified and discussed herein, prime editing can be used to (a) install mutation-correcting changes to a nucleotide sequence, (b) install protein and RNA tags, (c) installation of immunoepitopes on proteins of interest, (d) install inducible dimerization domains in proteins, (e) install or remove sequences to alter that activity of a biomolecule, (f) install recombinase target sites to direct specific genetic changes, and (g) mutagenesis of a target sequence by using an error-prone RT. In addition to these methods which, in general, insert, change, or delete nucleotide sequences at target sites of interest, prime editors can also be used to construct highly programmable libraries, as well as to conduct cell data recording and lineage tracing studies. The inventors have also contemplated additional design features of PEgRNAs that are aimed to improve the efficacy of prime editing. Still further, the inventors have conceived of methods for successfully delivering prime editors using vector delivery systems and which involve splitting the napDNAbp using intein domains.

[0686] The term “prime editing system” or “prime editor (PE)” refers the compositions involved in the method of genome editing using target-primed reverse transcription (TPRT) describe herein, including, but not limited to the napDNAbps, reverse transcriptases, fusion proteins (e.g., comprising napDNAbps and reverse transcriptases), extended guide RNAs, and complexes comprising fusion proteins and extended guide RNAs, as well as accessory elements, such as second strand nicking components and 5′ endogenous DNA flap removal endonucleases (e.g., FEN1) for helping to drive the prime editing process towards the edited product formation.

[0687] In another embodiment, the schematic of FIG. 3F depicts the interaction of a typical PEgRNA with a target site of a double stranded DNA and the concomitant production of a 3′ single stranded DNA flap containing the genetic change of interest. The double strand DNA is shown with the top strand in the 3′ to 5′ orientation and the lower strand in the 5′ to 3′ direction. The top strand comprises the “protospacer” and the PAM sequence and is referred to as the “target strand.” The complementary lower strand is referred to as the “non-target strand.” Although not shown, the PEgRNA depicted would be complexed with a Cas9 or equivalent. As shown in the schematic, the spacer of the PEgRNA anneals to a complementary region on the target strand, which is referred to as the protospacer, which is located just downstream of the PAM sequence is approximately 20 nucleotides in length. This interaction forms as DNA/RNA hybrid between the spacer RNA and the protospacer DNA, and induces the formation of an R loop in the region opposite the protospacer. As taught elsewhere herein, the Cas9 protein (not shown) then induces a nick in the non-target strand, as shown. This then leads to the formation of the 3′ ssDNA flap region which, in accordance with *z*, interacts with the 3′ end of the PEgRNA at the primer binding site. The 3′ end of the ssDNA flap (i.e., the reverse transcriptase primer sequence) anneals to the primer binding site (A) on the PEgRNA, thereby priming reverse transcriptase. Next, reverse transcriptase (e.g., provided in trans or provided cis as a fusion protein, attached to the Cas9 construct) then polymerizes a single strand of DNA which is coded for by the edit template (B) and homology arm (C). The polymerization continues towards the 5′ end of the extension arm. The polymerized strand of ssDNA forms a ssDNA 3′ end flap which, as describe elsewhere (e.g., as shown in FIG. 1G), invades the endogenous DNA, displacing the corresponding endogenous strand (which is removed as a 5′ DNA flap of endogenous DNA), and installing the desired nucleotide edit (single nucleotide base pair change, deletions, insertions (including whole genes) through naturally occurring DNA repair/replication rounds.

[0688] This application of prime editing can be further described in Example 1.

[0689] B. Mutagenesis Using Prime Editing with Error-Prone RT

[0690] In various embodiments, the prime editing system (i.e., prime editing system) may include the use of an error-prone reverse transcriptase for performing targeted mutagenesis, i.e., to mutate only a well-defined stretch of DNA in a genome or other DNA element in a cell. FIG. 22 provides a schematic of an exemplary process for introducing conducting targeted mutagenesis with an error-prone reverse transcriptase on a target locus using a nucleic acid programmable DNA binding protein (napDNAbp) complexed with an extended guide RNA. This process may be referred to as an embodiment of prime editing for targeted mutagenesis. The extended guide RNA comprises an extension at the 3′ or 5′ end of the guide RNA, or at an intramolecular location in the guide RNA. In step (a), the napDNAbp/gRNA complex contacts the DNA molecule and the gRNA guides the napDNAbp to bind to the target locus to be mutagenized. In step (b), a nick in one of the strands of DNA of the target locus is introduced (e.g., by a nuclease or chemical agent), thereby creating an available 3′ end in one of the strands of the target locus. In certain embodiments, the nick is created in the strand of DNA that corresponds to the R-loop strand, i.e., the strand that is not hybridized to the guide RNA sequence. In step (c), the 3′ end DNA strand interacts with the extended portion of the guide RNA in order to prime reverse transcription. In certain embodiments, the 3′ ended DNA strand hybridizes to a specific RT priming sequence on the extended portion of the guide RNA. In step (d), an error-prone reverse transcriptase is introduced which synthesizes a mutagenized single strand of DNA from the 3′ end of the primed site towards the 3′ end of the guide RNA. Exemplary mutations are indicated with an asterisk “*”. This forms a single-strand DNA flap comprising the desired mutagenized region. In step (e), the napDNAbp and guide RNA are released. Steps (f) and (g) relate to the resolution of the single strand DNA flap (comprising the mutagenized region) such that the desired mutagenized region becomes incorporated into the target locus. This process can be driven towards the desired product formation by removing the corresponding 5′ endogenous DNA flap that forms once the 3′ single strand DNA flap invades and hybridizes to the complementary sequence on the other strand. The process can also be driven towards product formation with second strand nicking, as exemplified in FIG. 1F. Following endogenous DNA repair and/or replication processes, the mutagenized region becomes incorporated into both strands of DNA of the DNA locus.

[0691] This application of prime editing can be further described in Example 2.

[0692] Error-prone or mutagenic RT enzymes are known in the art. As used herein, the term “error-prone” reverse transcriptase refers to a reverse transcriptase enzyme that occurs naturally or which has been derived from another reverse transcriptase (e.g., a wild type M-MLV reverse transcriptase) which has an error rate that is less than the error rate of wild type M-MLV reverse transcriptase. The error rate of wild type M-MLV reverse transcriptase is reported to be in the range of one error in 15,000 to 27,000 nucleobase incorporations. See Boutabout et al. (2001) “DNA synthesis fidelity by the reverse transcriptase of the yeast retrotransposon Ty 1,” Nucleic Acids Res 29(11):2217-2222, which is incorporated herein by reference. Thus, for purposes of this application, the term “error prone” refers to those RT that have an error rate that is greater than one error in 15,000 nucleobase incorporation (6.7 ×10⁻⁵ or higher), e.g., 1 error in 14,000 nucleobases (7.14×10⁻⁵ or higher), 1 error in 13,000 nucleobases or fewer (7.7×10⁻⁵ or higher), 1 error in 12,000 nucleobases or fewer (7.7×10⁻⁵ or higher), 1 error in 11,000 nucleobases or fewer (9.1×10⁻⁵ or higher), 1 error in 10,000 nucleobases or fewer (1×10⁻⁴ or 0.0001 or higher), 1 error in 9,000 nucleobases or fewer (0.00011 or higher), 1 error in 8,000 nucleobases or fewer (0.00013 or higher) 1 error in 7,000 nucleobases or fewer (0.00014 or higher), 1 error in 6,000 nucleobases or fewer (0.00016 or higher), 1 error in 5,000 nucleobases or fewer (0.0002 or higher), 1 error in 4,000 nucleobases or fewer (0.00025 or higher), 1 error in 3,000 nucleobases or fewer (0.00033 or higher), 1 error in 2,000 nucleobase or fewer (0.00050 or higher), or 1 error in 1,000 nucleobases or fewer (0.001 or higher), or 1 error in 500 nucleobases or fewer (0.002 or higher), or 1 error in 250 nucleobases or fewer (0.004 or higher).

[0693] A variety of mutagenic RTs could be envisioned for generation of mutagenized sequences using prime editing. Two such examples are the mutagenic reverse transcriptases from Bordetella phage (see Handa, S., et al. Nucl Acids Res 9711-25 (2018), which is incorporated herein by reference) and Legionella pneumophila (see Arambula, D., et al. Proc Nal Acad Sci USA 8212-7 (2013), which is incorporated by reference). In the case of the RT from Bordetella phage (brt), an accessory protein might need to also be added (bavd) to Cas9—or delivered in trans—as well as additional RNA sequences to the PEgRNA to improve binding of the mutagenic RT to the target site (see Handa, S., et al. Nucl Acids Res 9711-25 (2018)). When using mutagenic RTs, the template region of the PEgRNA might be enriched in adenosines or AAY codons to enhance diversity.

[0694] The amino acid sequence of the mutagenic RT from Bordetella phage is provided as follows. Like other RTs disclosed herein, the Brt protein may be fused to a napDNAbp as a fusion protein to form a functional PE.

| Name | Sequence |
|---|---|
| brt | MGKRHRNLIDQITTWENLLDAYRKTSHGKRRTWGYLEFKEY |
| mutagenic | DLANLLALQAELKAGNYERGPYREFLVYEPKPRLISALEFK |
| rt | DRLVQHALCNIVAPIFEAGLLPYTYACRPDKGTHAGVCHVQ |
| | AELRRTRATHFLKSDFSKFFPSIDRAALYAMIDKKIHCAAT |
| | RRLLRVVLPDEGVGIPIGSLTSQLFANVYGGAVDRLLHDEL |
| | KQRHWARYMDDIVVLGDDPEELRAVFYRLRDFASERLGLKI |
| | SHWQVAPVSRGINFLGYRIWPTHKLLRKSSVKRAKRKVANF |
| | IKHGEDESLQRFLASWSGHAQWADTHNLFTWMEEQYGIACH |
| | (SEQ ID NO: 235) |

[0695] In the case of Brt from Bordetella, the PE fusion may also include an additional accessory protein (Bavd). The accessory protein may be fused to the PE fusion protein or provided in trans. The amino acid sequence of Bavd accessory protein is provided as follows:

| Name | Sequence |
|---|---|
| bavd | MEPIEEATKCYDQMLIVERYERVISYLYPIAQSIP |
| accessory | RKHGVAREMFLKCLLGQVELFIVAGKSNQVSKLYA |
| protein | ADAGLAMLRFWLRFLAGIQKPHAMTPHQVETAQVL |
| to brt | IAEVGRILGSWIARVNRKGQAGK (SEQ ID |
| | NO: 236) |

[0696] In the case of Brt from Bordetella, the PEgRNA may comprise an additional nucleotide sequence added a PEgRNA, e.g., to the 5′ or 3′ end. Exemplary sequence is as follows, which is originally from the Bordetella phage genome:

| NAME | SEQUENCE |
|---|---|
| PEGRNA- | ACCUUCUUGCAUGGCUCUGCCAACGCUACGGCUUGGCGGG |
| ADDITION | CUGGCCUUUCCUCAAUAGGUGGUCAGCCGGUUCUGUCCUG |
| 1 | CUUCGGCGAACACGUUACACGGUUCGGCAAAACGUCGAUU |
| | ACUGAAAAUGGAAAGGCGGGGCCGACUUCAAGGGCAGGCU |
| | GGGAAAUAA (SEQ ID NO: 237) |

[0697] This PEgRNA addition sequence can be reduced in various ways to shorten the length. For example, the PEgRNA-addition 1 sequence could be reduced to the following exemplary alternative addition sequences:

| NAME | SEQUENCE |
|---|---|
| PEGRNA- | ACCUUCUUGCAUGGCUCUGCCAACGCUACGGCUUGGCGGGCUGGC |
| ADDITION | CUUUCCUCAAUAGGUGGUCAGCCGGUUCUGUCCUGCUUCGGCGAA |
| 2 | CACGUUACACGGUUCGGCAAAACGUCGAUUACUGAAAAUGGAAAG |
| | GCGGGGCCGACUUC (SEQ ID NO: 238) |
| PEGRNA- | ACCUUCUUGCAUGGCUCUGCCAACGCUACGGCUUGGCGGGCUGGC |
| ADDITION | CUUUCCUCAAUAGGUGGUCAAAGGGCAGGCUGGGAAAUAA (SEQ |
| 3 | ID NO: 239) |
| PEGRNA- | ACCUUCUUGCAUGGCUCUGCCAACGCUACGGCUUGGCGGGCUGGC |
| ADDITION | CUUUCCUCAAUAGGUGGUCA (SEQ ID NO: 277) |
| 4 | |
| PEGRNA- | CAUGGCUCUGCCAACGCUACGGCUUGGCGGGCUGGCCUUUCCUCA |
| ADDITION | AUAGGUGGUCAGCCGGUUCUGUCCUGCUUCGGCGAACACGUUACA |
| 5 | CGGUUCGGCAAAACGUCGAUUACUGAAAAUGGAAAGGCGGGGCCG |
| | ACUUCAAGGGCAGGCUGGGAAAUAA (SEQ ID NO: 240) |
| PEGRNA- | CAUGGCUCUGCCAACGCUACGGCUUGGCGGGCUGGCCUUUCCUCA |
| ADDITION | AUAGGUGGUCAGCCGGUUCUGUCCUGCUUCGGCGAACACGUUACA |
| 6 | CGGUUCGGCAAAACGUCGAUUACUGAAAAUGGAAAGGCGGGGCCG |
| | ACUUC (SEQ ID NO: 241) |
| PEGRNA- | CAUGGCUCUGCCAACGCUACGGCUUGGCGGGCUGGCCUUUCCUCA |
| ADDITION | AUAGGUGGUCAAAGGGCAGGCUGGGAAAUAA (SEQ ID NO: 242) |
| 7 | |
| PEGRNA- | CAUGGCUCUGCCAACGCUACGGCUUGGCGGGCUGGCCUUUCCUCA |
| ADDITION | AUAGGUGGUCA |
| 8 | (SEQ ID NO: 243) |

[0698] In other embodiments, the PEgRNA addition sequence can be also be mutated. For example, the PEgRNA-addition 1 sequence could be mutated to the following exemplary alternative addition sequence:

| NAME | SEQUENCE |
|---|---|
| PEGRNA- | ACCUUCUUGCAUGGCUCUGCCAACGCUACGGCUUGGCGGGC |
| ADDITION | UGGCCUUUCCUCAAUAGAUGAGCCGCCGGUUCUGUCCUGCU |
| 1 | UCGGCGAACACGUUACACGGUUCGGCAAAACGUCGAUUACU |
| MUTATED | GAAAAUGGAAAGGCGGGGCCGACUUCAAGGGCAGGCUGGGA |
| | AAUAA (SEQ ID NO: 244) |

[0699] In various embodiments relating to the use of PE for introducing mutations, special PEgRNA considerations may apply. For example, without wishing to be bound by theory, the additional PEgRNA sequences described above might be needed to enable efficient mutagenesis via mutagenic RTs.

[0700] Any mutagenic RT may be used with the prime editors disclosed herein. For example, the error-prone RT described in the following references may be used and are incorporated herein by reference:

[0701] Bebenek et al., “Error-prone polymerization by HIV-1 reverse transcriptase. Contribution of template-primer misalignment, miscoding, and termination probability to mutational hot spots.,” J. Biol Chem, 1993, 268: 10324-34; and

[0702] Menendez-Arias, “Mutation rates and instrinsic fidelity of retroviral reverse transcriptases,” 2009, Viruses, 1(3): 1137-1165.

[0703] Various error-prone RTs can include, but are not limited to, the following enzymes disclosed in Table 1 of Menendez-Arias et al. (the entire contents of the reference of which are incorporated by reference), as follows:

| ERROR-PRONE RT | REPORTED ERROR-RATE RANGE |
|---|---|
| HIV-1 RT (GROUP M, | 0.6 X 10-4 TO 2.0 X 10-4 |
| SUBTYPE B) | |
| HIV-1 RT (GROUP O) | 5.5 X 10-5 |
| SIV AGM RT | 2.9 X 10-5 |
| SIV MNE RT | 1.6 X 10-5 TO 1.2 X 10-4 |
| PFV RT | 1.7 X 10-4 |
| FIV RT | 6.2 X 10-5 |
| AMV RT | 5.9 X 10-5 |
| MO-MLV RT | 2.7 X 10-5 TO 3.3 X 10-5 |

[0704] C. Use of Prime Editing for Treating Triplet Expansion Disorders

[0705] The prime editing system or prime editing (PE) system described herein may be used to contract trinucleotide repeat mutations (or “triplet expansion diseases”) to treating conditions such as Huntington's disease and other trinucleotide repeat disorders. Trinucleotide repeat expansion disorders are complex, progressive disorders that involve developmental neurobiology and often affect cognition as well as sensori-motor functions. The disorders show genetic anticipation (i.e. increased severity with each generation). The DNA expansions or contractions usually happen meiotically (i.e. during the time of gametogenesis, or early in embryonic development), and often have sex-bias meaning that some genes expand only when inherited through the female, others only through the male. In humans, trinucleotide repeat expansion disorders can cause gene silencing at either the transcriptional or translational level, which essentially knocks out gene function. Alternatively, trinucleotide repeat expansion disorders can cause altered proteins generated with large repetitive amino acid sequences that either abrogate or change protein function, often in a dominant-negative manner (e.g. poly-glutamine diseases).

[0706] Without wishing to be bound by theory, triplet expansion is caused by slippage during DNA replication or during DNA repair synthesis. Because the tandem repeats have identical sequence to one another, base pairing between two DNA strands can take place at multiple points along the sequence. This may lead to the formation of “loop out” structures during DNA replication or DNA repair synthesis. This may lead to repeated copying of the repeated sequence, expanding the number of repeats. Additional mechanisms involving hybrid RNA:DNA intermediates have been proposed. Prime editing may be used to reduce or eliminate these triplet expansion regions by deletion one or more or the offending repeat codon triplets. In an embodiment of this use, FIG. 23, provides a schematic of a PEgRNA design for contracting or reducing trinucleotide repeat sequences with prime editing.

[0707] Prime editing may be implemented to contract triplet expansion regions by nicking a region upstream of the triplet repeat region with the prime editor comprising a PEgRNA appropriated targeted to the cut site. The prime editor then synthesizes a new DNA strand (ssDNA flap) based on the PEgRNA as a template (i.e., the edit template thereof) that codes for a healthy number of triplet repeats (which depends on the particular gene and disease). The newly synthesized ssDNA strand comprising the healthy triplet repeat sequence also is synthesized to include a short stretch of homology (i.e., the homology arm) that matches the sequence adjacent to the other end of the repeat (red strand). Invasion of the newly synthesized strand, and subsequent replacement of the endogenous DNA with the newly synthesized ssDNA flap, leads to a contracted repeat allele.

[0708] Depending on the particular trinucleotide expansion disorder, the defect-inducing triplet expansions may occur in “trinucleotide repeat expansion proteins.” Trinucleotide repeat expansion proteins are a diverse set of proteins associated with susceptibility for developing a trinucleotide repeat expansion disorder, the presence of a trinucleotide repeat expansion disorder, the severity of a trinucleotide repeat expansion disorder or any combination thereof. Trinucleotide repeat expansion disorders are divided into two categories determined by the type of repeat. The most common repeat is the triplet CAG, which, when present in the coding region of a gene, codes for the amino acid glutamine (Q). Therefore, these disorders are referred to as the polyglutamine (polyQ) disorders and comprise the following diseases: Huntington Disease (HD); Spinobulbar Muscular Atrophy (SBMA); Spinocerebellar Ataxias (SCA types 1, 2, 3, 6, 7, and 17); and Dentatorubro-Pallidoluysian Atrophy (DRPLA). The remaining trinucleotide repeat expansion disorders either do not involve the CAG triplet or the CAG triplet is not in the coding region of the gene and are, therefore, referred to as the non-polyglutamine disorders. The non-polyglutamine disorders comprise Fragile X Syndrome (FRAXA); Fragile XE Mental Retardation (FRAXE); Friedreich Ataxia (FRDA); Myotonic Dystrophy (DM); and Spinocerebellar Ataxias (SCA types 8, and 12).

[0709] The proteins associated with trinucleotide repeat expansion disorders can be selected based on an experimental association of the protein associated with a trinucleotide repeat expansion disorder to a trinucleotide repeat expansion disorder. For example, the production rate or circulating concentration of a protein associated with a trinucleotide repeat expansion disorder may be elevated or depressed in a population having a trinucleotide repeat expansion disorder relative to a population lacking the trinucleotide repeat expansion disorder. Differences in protein levels may be assessed using proteomic techniques including but not limited to Western blot, immunohistochemical staining, enzyme linked immunosorbent assay (ELISA), and mass spectrometry. Alternatively, the proteins associated with trinucleotide repeat expansion disorders may be identified by obtaining gene expression profiles of the genes encoding the proteins using genomic techniques including but not limited to DNA microarray analysis, serial analysis of gene expression (SAGE), and quantitative real-time polymerase chain reaction (Q-PCR).

[0710] Non-limiting examples of proteins associated with trinucleotide repeat expansion disorders which can be corrected by prime editing include AR (androgen receptor), FMR1 (fragile X mental retardation 1), HTT (huntingtin), DMPK (dystrophia myotonica-protein kinase), FXN (frataxin), ATXN2 (ataxin 2), ATN1 (atrophin 1), FEN1 (flap structure-specific endonuclease 1), TNRC6A (trinucleotide repeat containing 6A), PABPN1 (poly(A) binding protein, nuclear 1), JPH3 (junctophilin 3), MED15 (mediator complex subunit 15), ATXN1 (ataxin 1), ATXN3 (ataxin 3), TBP (TATA box binding protein), CACNA1A (calcium channel, voltage-dependent, P/Q type, alpha 1A subunit), ATXN80S (ATXN8 opposite strand (non-protein coding)), PPP2R2B (protein phosphatase 2, regulatory subunit B, beta), ATXN7 (ataxin 7), TNRC6B (trinucleotide repeat containing 6B), TNRC6C (trinucleotide repeat containing 6C), CELF3 (CUGBP, Elav-like family member 3), MAB21L1 (mab-21-like 1 (C. elegans)), MSH2 (mutS homolog 2, colon cancer, nonpolyposis type 1 (E. coli)), TMEM185A (transmembrane protein 185A), SIX5 (SIX homeobox 5), CNPY3 (canopy 3 homolog (zebrafish)), FRAXE (fragile site, folic acid type, rare, fra(X)(q28) E), GNB2 (guanine nucleotide binding protein (G protein), beta polypeptide 2), RPL14 (ribosomal protein L14), ATXN8 (ataxin 8), INSR (insulin receptor), TTR (transthyretin), EP400 (E1A binding protein p400), GIGYF2 (GRB10 interacting GYF protein 2), OGG1 (8-oxoguanine DNA glycosylase), STC1 (stanniocalcin 1), CNDP1 (carnosine dipeptidase 1 (metallopeptidase M20 family)), C00orf2 (chromosome 10 open reading frame 2), MAML3 mastermind-like 3 (Drosophila), DKC1 (dyskeratosis congenita 1, dyskerin), PAXIP1 (PAX interacting (with transcription-activation domain) protein 1), CASK (calcium/calmodulin-dependent serine protein kinase (MAGUK family)), MAPT (microtubule-associated protein tau), SP1 (Sp1 transcription factor), POLG (polymerase (DNA directed), gamma), AFF2 (AF4/FMR2 family, member 2), THBS1 (thrombospondin 1), TP53 (tumor protein p53), ESR1 (estrogen receptor 1), CGGBP1 (CGG triplet repeat binding protein 1), ABT1 (activator of basal transcription 1), KLK3 (kallikrein-related peptidase 3), PRNP (prion protein), JUN (jun oncogene), KCNN3 (potassium intermediate/small conductance calcium-activated channel, subfamily N, member 3), BAX (BCL2-associated X protein), FRAXA (fragile site, folic acid type, rare, fra(X)(q27.3) A (macroorchidism, mental retardation)), KBTBD10 (kelch repeat and BTB (POZ) domain containing 10), MBNL1 (muscleblind-like (Drosophila)), RAD51 (RAD51 homolog (RecA homolog, E. coli) (S. cerevisiae)), NCOA3 (nuclear receptor coactivator 3), ERDA1 (expanded repeat domain, CAG/CTG 1), TSC1 (tuberous sclerosis 1), COMP (cartilage oligomeric matrix protein), GCLC (glutamate-cysteine ligase, catalytic subunit), RRAD (Ras-related associated with diabetes), MSH3 (mutS homolog 3 (E. coli)), DRD2 (dopamine receptor D2), CD44 (CD44 molecule (Indian blood group)), CTCF (CCCTC-binding factor (zinc finger protein)), CCND1 (cyclin D1), CLSPN (claspin homolog (Xenopus laevis)), MEF2A (myocyte enhancer factor 2A), PTPRU (protein tyrosine phosphatase, receptor type, U), GAPDH (glyceraldehyde-3-phosphate dehydrogenase), TRIM22 (tripartite motif-containing 22), WT1 (Wilms tumor 1), AHR (aryl hydrocarbon receptor), GPX1 (glutathione peroxidase 1), TPMT (thiopurine S-methyltransferase), NDP (Norrie disease (pseudoglioma)), ARX (aristaless related homeobox), MUS81 (MUS81 endonuclease homolog (S. cerevisiae)), TYR (tyrosinase (oculocutaneous albinism IA)), EGR1 (early growth response 1), UNG (uracil-DNA glycosylase), NUMBL (numb homolog (Drosophila)-like), FABP2 (fatty acid binding protein 2, intestinal), EN2 (engrailed homeobox 2), CRYGC (crystallin, gamma C), SRP14 (signal recognition particle 14 kDa (homologous Alu RNA binding protein)), CRYGB (crystallin, gamma B), PDCD1 (programmed cell death 1), HOXA1 (homeobox A1), ATXN2L (ataxin 2-like), PMS2 (PMS2 postmeiotic segregation increased 2 (S. cerevisiae)), GLA (galactosidase, alpha), CBL (Cas-Br-M (murine) ecotropic retroviral transforming sequence), FTH1 (ferritin, heavy polypeptide 1), IL12RB2 (interleukin 12 receptor, beta 2), OTX2 (orthodenticle homeobox 2), HOXA5 (homeobox A5), POLG2 (polymerase (DNA directed), gamma 2, accessory subunit), DLX2 (distal-less homeobox 2), SIRPA (signal-regulatory protein alpha), OTX1 (orthodenticle homeobox 1), AHRR (aryl-hydrocarbon receptor repressor), MANF (mesencephalic astrocyte-derived neurotrophic factor), TMEM158 (transmembrane protein 158 (gene/pseudogene)), and ENSG00000078687.

[0711] The prime editors herein disclosed may be used to contract triplet repeat expansion regions in any of the above-indicated disease proteins, including following polyglutamine triplet expansion disease genes (which show the particular location of the pathogenic repeats that may be removed wholly or in part by prime editing):

| | | POSITION OF |
|---|---|---|
| TRIPLET EXPANSION | AFFECTED | PATHOGENIC |
| DISEASE | GENE | REPEATS |
| DENTATORUBRO- | ATN1 | 49-88 |
| PALLIDOLUYSIAN | ATROPHIN-1 | |
| ATROPHY | | |
| HUNTINGTON'S DISEASE | HTT | 36-250 |
| | THE HUNTINGTIN | |
| | GENE | |
| SPINAL AND BULBAR | AR | 38-62 |
| MUSCULAR ATROPHY | ANDROGEN | |
| | RECEPTOR | |
| SPINOCEREBELLAR | ATXN1 | 49-88 |
| ATAXIA TYPE 1 | ATAXIN 1 | |
| SPINOCEREBELLAR | ATXN2 | 33-77 |
| ATAXIA TYPE 2 | ATAXIN 2 | |
| SPINOCEREBELLAR | ATXN3 | 55-86 |
| ATAXIA TYPE 3 | ATAXIN 3 | |
| SPINOCEREBELLAR | CACNA1A | 21-30 |
| ATAXIA TYPE 6 | | |
| SPINOCEREBELLAR | ATXN7 | 38-120 |
| ATAXIA TYPE 7 | ATAXIN 7 | |
| SPINOCEREBELLAR | TBP | 47-63 |
| ATAXIA TYPE 17 | TATA-BINDING | |
| | PROTEIN | |

[0712] The prime editors herein disclosed may also be used to contract triplet repeat expansion regions typically found in the following non-polyglutamine triplet expansion disease genes:

| | | POSITION OF |
|---|---|---|
| TRIPLET EXPANSION | | PATHOGENIC |
| DISEASE | AFFECTED GENE | REPEATS |
| FRAXA (FRAGILE X | FMR1 | 230+ |
| SYNDROME) | FRAGILE X | |
| | MENTAL | |
| | RETARDATION | |
| | PROTEIN | |
| FXTAS (FRAGILE X- | FMR1 | 55-200 |
| ASSOCIATED | | |
| TREMOR/ATAXIA | | |
| SYNDROME) | | |
| FRAXE (FRAGILE XE | AFF2 | 200+ |
| MENTAL RETARDATION) | | |
| FRDA (FRIEDREICH'S | FXN | 100+ |
| ATAXIA) | FRATAXIN | |
| DM1 (MYOTONIC | DMPK | 50+ |
| DYSTROPHY TYPE 1) | MYOTONIN- | |
| | PROTEIN KINASE | |
| SCA8 | SCA8 | 110-250 |
| (SPINOCEREBELLAR | ATAXIN 8 | |
| ATAXIA TYPE 8) | | |
| SCA12 | PPP2R2B | 66-78 |
| (SPINOCEREBELLAR | SERINE/THREONIN | |
| ATAXIA TYPE 12) | PROTEIN | |
| | PHOSPHATASE 2A | |

[0713] Prime editing may be implemented to contract triplet expansion regions using a PEgRNA with an edit template that is designed to delete at least one codon of a triplet expansion region. In other embodiments, the PEgRNAs for using in prime editing for this used to delete at least 1, or 2, or 3, or 4, or 5, or 6, or 7, or 8, or 9, or 10, or 11, or 12, or 13, or 14, or 15, or 16, or 17, or 18, or 19, or 20, or 21, or 22, or 23, or 24, or 25, or 26, or 27, or 28, or 29, or 30, or 31, or 32, or 33, or 34, or 35, or 36, or 37, or 38, or 39, or 40, or 41, or 42, or 43, or 44, or 45, or 46, or 47, or 48, or 49, or 50, or 51, or 52, or 53, or 54, or 55, or 56, or 57, or 58, or 59, or 60, or 61, or 62, or 63, or 64, or 65, or 66, or 67, or 68, or 69, or 70, or 71, or 72, or 73, or 74, or 75, or 76, or 77, or 78, or 79, or 80, or 81, or 82, or 83, or 84, or 85, or 86, or 87, or 88, or 89, or 90, or 91, or 92, or 93, or 94, or 95, or 96, or 97, or 98, or 99, or 100, or more codons from a triplet expansion region in order to arrive at a healthy (i.e., not associated with producing the disease) number of triplet repeats.

[0714] In other embodiments, the PEgRNAs for using in prime editing for this used to delete at least 1, or 2, or 3, or 4, or 5, or 6, or 7, or 8, or 9, or 10, or 11, or 12, or 13, or 14, or 15, or 16, or 17, or 18, or 19, or 20 or more codons from a triplet expansion region in order to arrive at a healthy (i.e., not associated with producing the disease) number of triplet repeats.

[0715] In other embodiments, the PEgRNAs for using in prime editing for this used to delete at least 1, or 2, or 3, or 4, or 5, or 6, or 7, or 8, or 9, or 10, or 11, or 12, or 13, or 14, or 15, or more codons from a triplet expansion region in order to arrive at a healthy (i.e., not associated with producing the disease) number of triplet repeats.

[0716] In other embodiments, the PEgRNAs for using in prime editing for this used to delete at least 1, or 2, or 3, or 4, or 5, or 6, or 7, or 8, or 9, or 10, or more codons from a triplet expansion region in order to arrive at a healthy (i.e., not associated with producing the disease) number of triplet repeats.

[0717] Prime editing may be configured to correct any triplet expansion region, such as those described in Budworth et al., “A Brief History of Triplet Repeat Diseases,” Methods Mol Biol, 2013, 1010: 3-17, US 20011/00165540 A1 (Genome editing of genes associated with trinucleotide repeat expansion disorders in animals), US 2016/0355796 A1 (Compositions and methods of use of crispr-cas systems in nucleotide repeat disorders

[0718] In various embodiments, the disclosure provides a prime editing construct suitable for use in a cell having a trinucleotide repeat expansion region in a defective gene comprising (a) a prime editor fusion comprising a napDNAbp and a reverse transcriptase, (b) a PEgRNA comprising a spacer sequence that targets the trinucleotide repeat expansion region and an extension arm comprising an edit template that codes for the removal of the trinucleotide repeat expansion region.

[0719] In various other embodiments, the disclosure provides a method for deleting all or a portion of a trinucleotide repeat expansion region in a defective gene in a cell using prime editing comprising contacting the cell with a prime editor fusion comprising a napDNAbp and a reverse transcriptase and a PEgRNA comprising a spacer sequence that targets the trinucleotide repeat expansion region and an extension arm comprising an edit template that codes for the removal of the trinucleotide repeat expansion region.

[0720] In various embodiments, the trinucleotide repeat comprises repeating CTG, CAG, CGG, CCG, GAA, or TTC trinucleotides.

[0721] In various other embodiments, the tetranucleotide repeats, pentanucleotide repeats, or hexanucleotide repeats.

### D. Use of Prime Editing for Peptide Tagging

[0722] In another aspect, the disclosure provides a method of using the herein described prime editors for genetically grafting one or more peptide tags onto a protein using prime editing, More in particular, the disclosure provides a method for genetically installing one or more peptide tags onto a protein comprising: contacting a target nucleotide sequence encoding the protein with a prime editor configured to insert therein a second nucleotide sequence encoding the one or more peptide tags to result in a recombinant nucleotide sequence that encodes a fusion protein comprising the protein fused to the protein tag.

[0723] In other embodiments, the disclosure provides a method for making a fusion protein comprising a peptide of interest and one or more peptide tags, the method comprising: contacting a target nucleotide sequence encoding the protein with a prime editor configured to insert therein a second nucleotide sequence encoding the one or more peptide tags to result in a recombinant nucleotide sequence that encodes the fusion protein comprising the protein fused to the protein tag.

[0724] In various embodiments, the target nucleotide sequence is a specific gene of interest in a genomic DNA. The gene of interest may encode a protein of interest (e.g., a receptor, an enzyme, a therapeutic protein, a membrane protein, a transport protein, a signal transduction protein, or an immunological protein, etc.). The gene of interest may also encode an RNA molecule, including, but not limited to, messenger RNA (mRNA), transfer RNA (tRNA), ribosomal RNA (rRNA), small nuclear RNA (snRNA), antisense RNA, guide RNA, microRNA (miRNA), small interfering RNA (siRNA), and cell-free RNA (cfRNA).

[0725] The peptide tag may be any peptide tag or variant thereof which imparts one or more functions onto a protein for purposes such as separation, purification, visualization, solubilization, or detection. The peptides tags can include “affinity tags” (to facilitate protein purification), “solubilization tags” (to assist in proper folding of proteins), “chromatography tags” (to alter chromatographic properties of proteins), “epitope tags” (to bind to high affinity antibodies), and “fluorescence tags” (to facilitate visualization of proteins in a cell or in vitro). Examples of peptide tags include, but are not limited to the following tags:

| NAME | AMINO ACID SEQUENCE | SEQ ID NO: |
|---|---|---|
| AVITAG ™ | GLNDIFEAQKIEWHE | SEQ ID NO: 245 |
| C-TAG | EPEA | SEQ ID NO: 246 |
| CALMODULIN-TAG | KRRWKKNFIAVSAANRFKKISSSGA | SEQ ID NO: 247 |
| | L | |
| POLYGLUTAMATE TAG | EEEEEE | SEQ ID NO: 248 |
| E-TAG | GAPVPYPDPLEPR | SEQ ID NO: 249 |
| FLAG-TAG | DYKDDDDK | SEQ ID NO: 250 |
| HA-TAG | YPYDVPDYA | SEQ ID NO: 251 |
| HIS-TAG | H (HIS₁) | SEQ ID NO: 252 |
| | HH (HIS₂) | SEQ ID NO: 253 |
| | HHH (HIS₃) | SEQ ID NO: 254 |
| | HHHH (HIS₄) | SEQ ID NO: 255 |
| | HHHHH (HIS₅) | SEQ ID NO: 256 |
| | HHHHHH (HIS₆) | SEQ ID NO: 257 |
| | HHHHHHH (HIS₇) | SEQ ID NO: 258 |
| | HHHHHHHH (HIS₈) | SEQ ID NO: 259 |
| | HHHHHHHHH (HIS₉) | SEQ ID NO: 260 |
| | HHHHHHHHHH (HIS₁₀) | SEQ ID NO: 261 |
| | HHHHHHHHHH...H... (HIS_{N}, | SEQ ID NO: 262 |
| | WHEREIN N = 1-25) | |
| MYC-TAG | EQKLISEEDL | SEQ ID NO: 263 |
| NE-TAG | TKENPRSNQEESYDDNES | SEQ ID NO: 264 |
| RHO1D4-TAG | TETSQVAPA | SEQ ID NO: 265 |
| S-TAG | KETAAAKFERQHMDS | SEQ ID NO: 266 |
| SBP-TAG | MDEKTTGWRGGHVVEGLAGELEQ | SEQ ID NO: 267 |
| | LRARLEHHPQGQREP | |
| SOFTAG-1 | SLAELLNAGLGGS | SEQ ID NO: 268 |
| SOFTAG-2 | TQDPSRVG | SEQ ID NO: 269 |
| SPOT-TAG | PDRVRAVSHWSS | SEQ ID NO: 270 |
| STREP-TAG | WSHPQFEK | SEQ ID NO: 271 |
| TC TAG | CCPGCC | SEQ ID NO: 272 |
| TY TAG | EVHTNQDPLD | SEQ ID NO: 273 |
| V5 TAG | GKPIPNPLLGLDST | SEQ ID NO: 274 |
| VSV-TAG | YTDIEMNRLGK | SEQ ID NO: 275 |
| XPRESS TAG | DLYDDDDK | SEQ ID NO: 276 |

[0726] Peptide tags may also be the following affinity tags (for separation and/or purification of proteins) (as described in Table 9.9.1 of Kimple et al., “Overview of Affinity Tags for Protein Purification,” Curr Protoc Protein Sci, 2013, 73:Unit-9.9, which is incorporated herein by reference).

| NAME | AMINO ACID SEQUENCE | |
|---|---|---|
| AU1 EPITOPE | DTYRYI | SEQ ID NO: 278 |
| AU5 EPITOPE | TDFYLK | SEQ ID NO: 279 |
| BACTERIOPHAGE T7 | MASMTGGQQMG | SEQ ID NO: 280 |
| EPITOPE (T7-TAG) | | |
| BLUETONGUE VIRUS TAG | QYPALT | SEQ ID NO: 281 |
| (B-TAG) | | |
| E2 EPITOPE | SSTSSDFRDR | SEQ ID NO: 282 |
| HISTIDINE AFFINITY TAG | KDHLIHNVHKEFHAHAHNK | SEQ ID NO: 283 |
| (HAT) | | |
| HSV EPITOPE | QPELAPED | SEQ ID NO: 284 |
| POLYARGININE | RRRRR | SEQ ID NO: 285 |
| (ARG-TAG) | | |
| POLYASPARTATE | CCCC | SEQ ID NO: 286 |
| (ASP-TAG) | | |
| POLYPHENYLALANINE | FFFFFFFFFFF | SEQ ID NO: 287 |
| (PHE-TAG) | | |
| S1-TAG | NANNPDWDF | SEQ ID NO: 288 |
| S-TAG | KETAAAKFERQHMDS | SEQ ID NO: 289 |
| VSV-G | YTDIEMNRLGK | SEQ ID NO: 290 |

[0727] In particular embodiments, the peptide tags may include a His⁶ tag, FLAG-tag, V5-tag, GCN4-tag, HA-tag, Myc-Tag, FIAsH/ReAsH-tag, Sortase substrate, pi-clamp.

[0728] In various embodiments, the peptide tags may be used for applications that include protein fluorescent labeling, immunoprecipitation, immunoblotting, immunohistochemistry, protein recruitment, inducible protein degrons, and genome-wide screening.

[0729] In various other embodiments, the peptide tag may include an intein sequence to install protein self-splicing function. As used herein, the term “intein” refers to auto-processing polypeptide domains found in organisms from all domains of life. An intein (intervening protein) carries out a unique auto-processing event known as protein splicing in which it excises itself out from a larger precursor polypeptide through the cleavage of two peptide bonds and, in the process, ligates the flanking extein (external protein) sequences through the formation of a new peptide bond. This rearrangement occurs post-translationally (or possibly co-translationally), as intein genes are found embedded in frame within other protein-coding genes. Furthermore, intein-mediated protein splicing is spontaneous; it requires no external factor or energy source, only the folding of the intein domain. This process is also known as cis-protein splicing, as opposed to the natural process of trans-protein splicing with “split inteins.” Inteins are the protein equivalent of the self-splicing RNA introns (see Perler et al., Nucleic Acids Res. 22:1125-1127 (1994)), which catalyze their own excision from a precursor protein with the concomitant fusion of the flanking protein sequences, known as exteins (reviewed in Perler et al., Curr. Opin. Chem. Biol. 1:292-299 (1997); Perler, F. B. Cell 92(1):1-4 (1998); Xu et al., EMBO J. 15(19):5146-5153 (1996)).

[0730] The mechanism of the protein splicing process has been studied in great detail (Chong, et al., J. Biol. Chem. 1996, 271, 22159-22168; Xu, M-Q & Perler, F. B. EMBO Journal, 1996, 15, 5146-5153) and conserved amino acids have been found at the intein and extein splicing points (Xu, et al., EMBO Journal, 1994, 13 5517-522).

[0731] Inteins can also exist as two fragments encoded by two separately transcribed and translated genes. These so-called split inteins self-associate and catalyze protein-splicing activity in trans. Split inteins have been identified in diverse cyanobacteria and archaea (Caspi et al, Mol Microbiol. 50: 1569-1577 (2003); Choi J. et al, J Mol Biol. 556: 1093-1106 (2006.); Dassa B. et al, Biochemistry. 46:322-330 (2007.); Liu X. and Yang J., J Biol Chem. 275:26315-26318 (2003); Wu H. et al. Proc Natl Acad Sci USA. 5:9226-9231 (1998.); and Zettler J. et al, FEBS Letters. 553:909-914 (2009)), but have not been found in eukaryotes thus far. Recently, a bioinformatic analysis of environmental metagenomic data revealed 26 different loci with a novel genomic arrangement. At each locus, a conserved enzyme coding region is interrupted by a split intein, with a freestanding endonuclease gene inserted between the sections coding for intein subdomains. Among them, five loci were completely assembled: DNA helicases (gp41-1, gp41-8); Inosine-5′-monophosphate dehydrogenase (IMPDH-1); and Ribonucleotide reductase catalytic subunits (NrdA-2 and NrdJ-1). This fractured gene organization appears to be present mainly in phages (Dassa et al, Nucleic Acids Research. 57:2560-2573 (2009)).

[0732] In certain embodiments, the prime editors described herein can be used to insert split-intein tags in two different proteins, causing their intracellular ligation when co-expressed to form a fusion protein. In protein trans-splicing, one precursor protein consists of an N-extein part followed by the N-intein, another precursor protein consists of the C-intein followed by a C-extein part, and a trans-splicing reaction (catalyzed by the N- and C-inteins together) excises the two intein sequences and links the two extein sequences with a peptide bond. Protein trans-splicing, being an enzymatic reaction, can work with very low (e.g., micromolar) concentrations of proteins and can be carried out under physiological conditions.

[0733] The split intein Npu DnaE was characterized as having the highest rate reported for the protein trans-splicing reaction. In addition, the Npu DnaE protein splicing reaction is considered robust and high-yielding with respect to different extein sequences, temperatures from 6 to 37° C., and the presence of up to 6M Urea (Zettler J. et al, FEBS Letters. 553:909-914 (2009); Iwai I. et al, FEBS Letters 550: 1853-1858 (2006)). As expected, when the Cysl Ala mutation at the N-domain of these inteins was introduced, the initial N to S-acyl shift and therefore protein splicing was blocked. Unfortunately, the C-terminal cleavage reaction was also almost completely inhibited. The dependence of the asparagine cyclization at the C-terminal splice junction on the acyl shift at the N-terminal scissile peptide bond seems to be a unique property common to the naturally split DnaE intein alleles (Zettler J. et al. FEBS Letters. 555:909-914 (2009)).

[0734] Protein trans-splicing, catalyzed by split inteins, provides an entirely enzymatic method for protein ligation. A split-intein is essentially a contiguous intein (e.g. a mini-intein) split into two pieces named N-intein and C-intein, respectively. The N-intein and C-intein of a split intein can associate non-covalently to form an active intein and catalyze the splicing reaction essentially in same way as a contiguous intein does. Split inteins have been found in nature and also engineered in laboratories. As used herein, the term “split intein” refers to any intein in which one or more peptide bond breaks exists between the N-terminal and C-terminal amino acid sequences such that the N-terminal and C-terminal sequences become separate molecules that can non-covalently reassociate, or reconstitute, into an intein that is functional for trans-splicing reactions. Any catalytically active intein, or fragment thereof, may be used to derive a split intein for use in the methods of the invention. For example, in one aspect the split intein may be derived from a eukaryotic intein. In another aspect, the split intein may be derived from a bacterial intein. In another aspect, the split intein may be derived from an archaeal intein. Preferably, the split intein so-derived will possess only the amino acid sequences essential for catalyzing trans-splicing reactions.

[0735] Split inteins may be created from contiguous inteins by engineering one or more split sites in the unstructured loop or intervening amino acid sequence between the −12 conserved beta-strands found in the structure of mini-inteins. Some flexibility in the position of the split site within regions between the beta-strands may exist, provided that creation of the split will not disrupt the structure of the intein, the structured beta-strands in particular, to a sufficient degree that protein splicing activity is lost.

[0736] The prime editors described herein may incorporate peptide tags (including inteins) into the C-terminal end of a protein of interest. In other embodiments, the peptide tags (including inteins) may be incorporated into the N-terminal end of a protein of interest. The peptide tags may also be incorporated into the interior of a protein of interest. The resulting fusion proteins created by the herein described prime editors may have the following structures:
[0737] [protein of interest]-[peptide tag];
[0738] [peptide tag]-[protein of interest]; or
[0739] [protein of interest-N-terminal region]-[peptide tag]-[protein of interest-C-terminal region].

[0740] The principles of guide RNA design for use in peptide tagging throughout may be applied to peptide tagging. For example, in one embodiment, the PEgRNA structure for peptide tagging may have the following structure: 5′-[spacer sequence]-[gRNA core or scaffold]-[extension arm]-3′, wherein the extension arm comprises in the 5′ to 3′ direction, a homology arm, edit template (comprising the sequence that encodes the peptide tag), and a primer binding site. This configuration is depicted in FIG. 3D and in FIG. 24.

[0741] In another embodiment, the PEgRNA structure for peptide tagging may have the following structure: 5′-[extension arm]-[spacer sequence]-[gRNA core or scaffold]-3′, wherein the extension arm comprises in the 5′ to 3′ direction, a homology arm, edit template (comprising the sequence that encodes the peptide tag), and a primer binding site. This configuration is depicted in FIG. 3E.

[0742] Embodiments of peptide tagging using prime editing is depicted in FIGS. 25 and 26 and described in Example 4.

[0743] E. Use of Prime Editing for Preventing or Treating Prion Disease

[0744] Prime editing can also be used to prevent or halt the progression of prion disease through the installation of one or more protective mutations into prion proteins (PRNP) which become misfolded during the course of disease. Prion diseases or transmissible spongiform encephalopathies (TSEs) are a family of rare progressive neurodegenerative disorders that affect both humans and animals. They are distinguished by long incubation periods, characteristic spongiform changes associated with neuronal loss, and a failure to induce inflammatory response.

[0745] In humans, prion disease includes Creutzfeldt-Jakob Disease (CJD), Variant Creutzfeldt-Jakob Disease (vCJD), Gerstmann-Straussler-Scheinker Syndrome, Fatal Familial Insomnia, and Kuru. In animals, prion disease includes Bovine Spongiform Encephalopathy (BSE or “mad cow disease”), Chronic Wasting Disease (CWD), Scrapie, Transmissible Mink Encephalopathy, Feline Spongiform Encephalopathy, and Ungulate Spongiform Encephalopathy. Prime editing may be used to install protective point mutations into a prion protein in order to prevent or halt the progression of any one of these prion diseases.

[0746] Classic CJD is a human prion disease. It is a neurodegenerative disorder with characteristic clinical and diagnostic features. This disease is rapidly progressive and always fatal. Infection with this disease leads to death usually within 1 year of onset of illness. CJD is a rapidly progressive, invariably fatal neurodegenerative disorder believed to be caused by an abnormal isoform of a cellular glycoprotein known as the prion protein. CJD occurs worldwide and the estimated annual incidence in many countries, including the United States, has been reported to be about one case per million population. The vast majority of CJD patients usually die within 1 year of illness onset. CJD is classified as a transmissible spongiform encephalopathy (TSE) along with other prion diseases that occur in humans and animals. In about 85% of patients, CJD occurs as a sporadic disease with no recognizable pattern of transmission. A smaller proportion of patients (5 to 15%) develop CJD because of inherited mutations of the prion protein gene. These inherited forms include Gerstmann-Straussler-Scheinker syndrome and fatal familial insomnia. No treatment is currently known for CJD.

[0747] Variant Creutzfeldt-Jakob disease (vCJD) is a prion disease that was first described in 1996 in the United Kingdom. There is now strong scientific evidence that the agent responsible for the outbreak of prion disease in cows, bovine spongiform encephalopathy (BSE or ‘mad cow’ disease), is the same agent responsible for the outbreak of vCJD in humans. Variant CJD (vCJD) is not the same disease as classic CJD (often simply called CJD). It has different clinical and pathologic characteristics from classic CJD. Each disease also has a particular genetic profile of the prion protein gene. Both disorders are invariably fatal brain diseases with unusually long incubation periods measured in years, and are caused by an unconventional transmissible agent called a prion. No treatment is currently known for vCJD.

[0748] BSE (bovine spongiform encephalopathy or “mad cow disease”) is a progressive neurological disorder of cattle that results from infection by an unusual transmissible agent called a prion. The nature of the transmissible agent is not well understood. Currently, the most accepted theory is that the agent is a modified form of a normal protein known as prion protein. For reasons that are not yet understood, the normal prion protein changes into a pathogenic (harmful) form that then damages the central nervous system of cattle. There is increasing evidence that there are different strains of BSE: the typical or classic BSE strain responsible for the outbreak in the United Kingdom and two atypical strains (H and L strains). No treatment is currently known for BSE.

[0749] Chronic wasting disease (CWD) is a prion disease that affects deer, elk, reindeer, sika deer and moose. It has been found in some areas of North America, including Canada and the United States, Norway and South Korea. It may take over a year before an infected animal develops symptoms, which can include drastic weight loss (wasting), stumbling, listlessness and other neurologic symptoms. CWD can affect animals of all ages and some infected animals may die without ever developing the disease. CWD is fatal to animals and there are no treatments or vaccines.

[0750] The causative agents of TSEs are believed to be prions. The term “prions” refers to abnormal, pathogenic agents that are transmissible and are able to induce abnormal folding of specific normal cellular proteins called prion proteins that are found most abundantly in the brain. The functions of these normal prion proteins are still not completely understood. The abnormal folding of the prion proteins leads to brain damage and the characteristic signs and symptoms of the disease. Prion diseases are usually rapidly progressive and always fatal.

[0751] As used herein, the term “prion” shall mean an infectious particle known to cause diseases (spongiform encephalopathies) in humans and animals. The term “prion” is a contraction of the words “protein” and “infection” and the particles are comprised largely if not exclusively of PRNPsc molecules encoded by a PRNP gene which expresses PRNPc which changes conformation to become PRNPsc. Prions are distinct from bacteria, viruses and viroids. Known prions include those which infect animals to cause scrapie, a transmissible, degenerative disease of the nervous system of sheep and goats as well as bovine spongiform encephalopathies (BSE) or mad cow disease and feline spongiform encephalopathies of cats. Four prion diseases, as discussed above, known to affect humans are (1) kuru, (2) Creutzfeldt-Jakob Disease (CJD), (3) Gerstmann-Strassler-Scheinker Disease (GSS), and (4) fatal familial insomnia (FFI). As used herein prion includes all forms of prions causing all or any of these diseases or others in any animals used—and in particular in humans and in domesticated farm animals.

[0752] In general, and without wishing to be bound by theory, prior diseases are caused by misfolding of prion proteins. Such diseases—often called deposition diseases—the misfolding of the prion proteins can be accounted for as follows. If A is the normally synthesized gene product that carries out an intended physiologic role in a monomeric or oligomeric state, A* is a conformationally activated form of A that is competent to undergo a dramatic conformational change, B is the conformationally altered state that prefers multimeric assemblies (i.e., the misfolded form which forms depositions) and Bₙ is the multimeric material that is pathogenic and relatively difficult to recycle. For the prion diseases, PRNPc and PRNPsc correspond to states A and Bₙ where A is largely helical and monomeric and Bₙ is β-rich and multimeric.

[0753] It is known that certain mutations in prion proteins can be associated with increased risk of prior disease. Conversely, certain mutations in prion proteins can be protective in nature. See Bagynszky et al., “Characterization of mutations in PRNP (prion) gene and their possible roles in neurodegenerative diseases,” Neuropsychiatr Dis Treat., 2018; 14: 2067-2085, the contents of which are incorporated herein by reference.

[0754] PRNP (NCBI RefSeq No. NP_000302.1 (SEQ ID NO: 291))—the human prion protein—is encoded by a 16 kb long gene, located on chromosome 20 (4686151-4701588). It contains two exons, and the exon 2 carries the open reading frame which encodes the 253 amino acid (AA) long PrP protein. Exon 1 is a noncoding exon, which may serve as transcriptional initiation site. The post-translational modifications result in the removal of the first 22 AA N-terminal fragment (NTF) and the last 23 AA C-terminal fragment (CTF). The NTF is cleaved after PrP transport to the endoplasmic reticulum (ER), while the CTF (glycosylphosphatidylinositol [GPI] signal peptide [GPI-SP]) is cleaved by the GPI anchor. GPI anchor could be involved in PrP protein transport. It may also play a role of attachment of prion protein into the outer surface of cell membrane. Normal PrP is composed of a long N-terminal loop (which contains the octapeptide repeat region), two short β sheets, three α helices, and a C-terminal region (which contains the GPI anchor). Cleavage of PrP results in a 208 AA long glyocoprotein, anchored in the cell membrane.

[0755] The amino acid sequence of PRNP (NP_000302.1) is as follows:

(SEQ ID NO: 291)
MANLGCWMLVLFVATWSDLGLCKKRPKPGGWNTGGSRYPGQGSPGGNRYPP
QGGGGWGQPHGGGWGQPHGGGWGQPHGGGWGQPHGGGWGQGGGTHSQWNKP
SKPKTNMKHMAGAAAAGAVVGGLGGYMLGSAMSRPIIHFGSDYEDRYYREN
MHRYPNQVYYRPMDEYSNQNNFVHDCVNITIKQHTVTTTTKGENFTETDVK
[sequence omitted]

[0756] The amino acid sequence of PRNP (NP_000302.1) is encoded by the following nucleotide sequence (NCBI Ref. Seq No. NM_000311.5, “Homo sapiens prion protein (PRNP), transcript variant 1, mRNA), is as follows:

(SEQ ID NO: 292)
GCGAACCTTGGCTGCTGGATGCTGGTTCTCTTTGTGGCCACATGGAGTGAC
CTGGGCCTCTGCAAGAAGCGCCCGAAGCCTGGAGGATGGAACACTGGGGGC
AGCCGATACCCGGGGCAGGGCAGCCCTGGAGGCAACCGCTACCCACCTCAG
GGCGGTGGTGGCTGGGGGCAGCCTCATGGTGGTGGCTGGGGGCAGCCTCAT
GGTGGTGGCTGGGGGCAGCCCCATGGTGGTGGCTGGGGACAGCCTCATGGT
GGTGGCTGGGGTCAAGGAGGTGGCACCCACAGTCAGTGGAACAAGCCGAGT
AAGCCAAAAACCAACATGAAGCACATGGCTGGTGCTGCAGCAGCTGGGGCA
GTGGTGGGGGGCCTTGGCGGCTACATGCTGGGAAGTGCCATGAGCAGGCCC
ATCATACATTTCGGCAGTGACTATGAGGACCGTTACTATCGTGAAAACATG
CACCGTTACCCCAACCAAGTGTACTACAGGCCCATGGATGAGTACAGCAAC
CAGAACAACTTTGTGCACGACTGCGTCAATATCACAATCAAGCAGCACACG
GTCACCACAACCACCAAGGGGGAGAACTTCACCGAGACCGACGTTAAGATG
ATGGAGCGCGTGGTTGAGCAGATGTGTATCACCCAGTACGAGAGGGAATCT
CAGGCCTATTACCAGAGAGGATCGAGCATGGTCCTCTTCTCCTCTCCACCT
GTGATCCTCCTGATCTCTTTCCTCATCTTCCTGATAGTGGGATGAGGAAGG
TCTTCCTGTTTTCACCATCTTTCTAATCTTTTTCCAGCTTGAGGGAGGCGG
TATCCACCTGCAGCCCTTTTAGTGGTGGTGTCTCACTCTTTCTTCTCTCTT
TGTCCCGGATAGGCTAATCAATACCCTTGGCACTGATGGGCACTGGAAAAC
ATAGAGTAGACCTGAGATGCTGGTCAAGCCCCCTTTGATTGAGTTCATCAT
GAGCCGTTGCTAATGCCAGGCCAGTAAAAGTATAACAGCAAATAACCATTG
GTTAATCTGGACTTATTTTTGGACTTAGTGCAACAGGTTGAGGCTAAAACA
AATCTCAGAACAGTCTGAAATACCTTTGCCTGGATACCTCTGGCTCCTTCA
GCAGCTAGAGCTCAGTATACTAATGCCCTATCTTAGTAGAGATTTCATAGC
TATTTAGAGATATTTTCCATTTTAAGAAAACCCGACAACATTTCTGCCAGG
TTTGTTAGGAGGCCACATGATACTTATTCAAAAAAATCCTAGAGATTCTTA
GCTCTTGGGATGCAGGCTCAGCCCGCTGGAGCATGAGCTCTGTGTGTACCG
AGAACTGGGGTGATGTTTTACTTTTCACAGTATGGGCTACACAGCAGCTGT
TCAACAAGAGTAAATATTGTCACAACACTGAACCTCTGGCTAGAGGACATA
TTCACAGTGAACATAACTGTAACATATATGAAAGGCTTCTGGGACTTGAAA
TCAAATGTTTGGGAATGGTGCCCTTGGAGGCAACCTCCCATTTTAGATGTT
TAAAGGACCCTATATGTGGCATTCCTTTCTTTAAACTATAGGTAATTAAGG
CAGCTGAAAAGTAAATTGCCTTCTAGACACTGAAGGCAAATCTCCTTTGTC
CATTTACCTGGAAACCAGAATGATTTTGACATACAGGAGAGCTGCAGTTGT
GAAAGCACCATCATCATAGAGGATGATGTAATTAAAAAATGGTCAGTGTGC
AAAGAAAAGAACTGCTTGCATTTCTTTATTTCTGTCTCATAATTGTCAAAA
ACCAGAATTAGGTCAAGTTCATAGTTTCTGTAATTGGCTTTTGAATCAAAG
AATAGGGAGACAATCTAAAAAATATCTTAGGTTGGAGATGACAGAAATATG
ATTGATTTGAAGTGGAAAAAGAAATTCTGTTAATGTTAATTAAAGTAAAAT
TATTCCCTGAATTGTTTGATATTGTCACCTAGCAGATATGTATTACTTTTC
TGCAATGTTATTATTGGCTTGCACTTTGTGAGTATTCTATGTAAAAATATA
TATGTATATAAAATATATATTGCATAGGACAGACTTAGGAGTTTTGTTTAG
AGCAGTTAACATCTGAAGTGTCTAATGCATTAACTTTTGTAAGGTACTGAA
TACTTAATATGTGGGAAACCCTTTTGCGTGGTCCTTAGGCTTACAATGTGC
ACTGAATCGTTTCATGTAAGAATCCAAAGTGGACACCATTAACAGGTCTTT
GAAATATGCATGTACTTTATATTTTCTATATTTGTAACTTTGCATGTTCTT
GTTTTGTTATATAAAAAAATTGTAAATGTTTAATATCTGACTGAAATTAAA
CGAGCGAAGATGAGCACCA

[0757] Mutation sites relative to PRNP (NP_000302.1) which are linked to CJD and FFI are reported are as follows. These mutations can be removed or installed using the prime editors disclosed herein.

| | AMINO ACID SEQUENCE OF MUTANT PRNP LINKED TO CJD PRION |
|---|---|
| | DISEASE (SEE TABLE 1 OF BAGYNSZKY ET AL., 2018) |
| MUTATION | (RELATIVE TO SEQ ID NO: 291 OF PRNP NP_000302.1) |
| D178N | MANLGCWMLVLFVATWSDLGLCKKRPKPGGWNTGGSRYPGQGSPGGNR |
| | YPPQGGGGWGQPHGGGWGQPHGGGWGQPHGGGWGQPHGGGWGQGG |
| | GTHSQWNKPSKPKTNMKHMAGAAAAGAVVGGLGGYMLGSAMSRPIIHF |
| | GSDYEDRYYRENMHRYPNQVYYRPMDEYSNQNNFVHNCVNITIKQHTVT |
| | TTTKGENFTETDVKMMERVVEQMCITQYERESQAYYQRGSSMVLFSSPPV |
| | ILLISFLIFLIVG (SEQ ID NO: 293) |
| T188K | MANLGCWMLVLFVATWSDLGLCKKRPKPGGWNTGGSRYPGQGSPGGNR |
| | YPPQGGGGWGQPHGGGWGQPHGGGWGQPHGGGWGQPHGGGWGQGG |
| | GTHSQWNKPSKPKTNMKHMAGAAAAGAVVGGLGGYMLGSAMSRPIIHF |
| | GSDYEDRYYRENMHRYPNQVYYRPMDEYSNQNNFVHDCVNITIKQHKVT |
| | TTTKGENFTETDVKMMERVVEQMCITQYERESQAYYQRGSSMVLFSSPPV |
| | ILLISFLIFLIVG (SEQ ID NO: 294) |
| E196K | MANLGCWMLVLFVATWSDLGLCKKRPKPGGWNTGGSRYPGQGSPGGNR |
| | YPPQGGGGWGQPHGGGWGQPHGGGWGQPHGGGWGQPHGGGWGQGG |
| | GTHSQWNKPSKPKTNMKHMAGAAAAGAVVGGLGGYMLGSAMSRPIIHF |
| | GSDYEDRYYRENMHRYPNQVYYRPMDEYSNQNNFVHDCVNITIKQHTVT |
| | TTTKGKNFTETDVKMMERVVEQMCITQYERESQAYYQRGSSMVLFSSPPV |
| | ILLISFLIFLIVG (SEQ ID NO: 295) |
| E196A | MANLGCWMLVLFVATWSDLGLCKKRPKPGGWNTGGSRYPGQGSPGGNR |
| | YPPQGGGGWGQPHGGGWGQPHGGGWGQPHGGGWGQPHGGGWGQGG |
| | GTHSQWNKPSKPKTNMKHMAGAAAAGAVVGGLGGYMLGSAMSRPIIHF |
| | GSDYEDRYYRENMHRYPNQVYYRPMDEYSNQNNFVHDCVNITIKQHTVT |
| | TTTKGANFTETDVKMMERVVEQMCITQYERESQAYYQRGSSMVLFSSPPV |
| | (SEQ ID NO: 296) |
| E200K | MANLGCWMLVLFVATWSDLGLCKKRPKPGGWNTGGSRYPGQGSPGGNR |
| | YPPQGGGGWGQPHGGGWGQPHGGGWGQPHGGGWGQPHGGGWGQGG |
| | GTHSQWNKPSKPKTNMKHMAGAAAAGAVVGGLGGYMLGSAMSRPIIHF |
| | GSDYEDRYYRENMHRYPNQVYYRPMDEYSNQNNFVHDCVNITIKQHTVT |
| | TTTKGENFTKTDVKMMERVVEQMCITQYERESQAYYQRGSSMVLFSSPPV |
| | ILLISFLIFLIVG (SEQ ID NO: 297) |
| E200G | MANLGCWMLVLFVATWSDLGLCKKRPKPGGWNTGGSRYPGQGSPGGNR |
| | YPPQGGGGWGQPHGGGWGQPHGGGWGQPHGGGWGQPHGGGWGQGG |
| | GTHSQWNKPSKPKTNMKHMAGAAAAGAVVGGLGGYMLGSAMSRPIIHF |
| | GSDYEDRYYRENMHRYPNQVYYRPMDEYSNQNNFVHDCVNITIKQHTVT |
| | TTTKGENFTGTDVKMMERVVEQMCITQYERESQAYYQRGSSMVLFSSPPV |
| | (SEQ ID NO: 298) |
| V203I | MANLGCWMLVLFVATWSDLGLCKKRPKPGGWNTGGSRYPGQGSPGGNR |
| | YPPQGGGGWGQPHGGGWGQPHGGGWGQPHGGGWGQPHGGGWGQGG |
| | GTHSQWNKPSKPKTNMKHMAGAAAAGAVVGGLGGYMLGSAMSRPIIHF |
| | GSDYEDRYYRENMHRYPNQVYYRPMDEYSNQNNFVHDCVNITIKQHTVT |
| | TTTKGENFTETDIKMMERVVEQMCITQYERESQAYYQRGSSMVLFSSPPVI |
| | LLISFLIFLIVG (SEQ ID NO: 299) |
| R208H | MANLGCWMLVLFVATWSDLGLCKKRPKPGGWNTGGSRYPGQGSPGGNR |
| | YPPQGGGGWGQPHGGGWGQPHGGGWGQPHGGGWGQPHGGGWGQGG |
| | GTHSQWNKPSKPKTNMKHMAGAAAAGAVVGGLGGYMLGSAMSRPIIHF |
| | GSDYEDRYYRENMHRYPNQVYYRPMDEYSNQNNFVHDCVNITIKQHTVT |
| | TTTKGENFTETDVKMMEHVVEQMCITQYERESQAYYQRGSSMVLFSSPPV |
| | ILLISFLIFLIVG (SEQ ID NO: 300) |
| V210I | MANLGCWMLVLFVATWSDLGLCKKRPKPGGWNTGGSRYPGQGSPGGNR |
| | YPPQGGGGWGQPHGGGWGQPHGGGWGQPHGGGWGQPHGGGWGQGG |
| | GTHSQWNKPSKPKTNMKHMAGAAAAGAVVGGLGGYMLGSAMSRPIIHF |
| | GSDYEDRYYRENMHRYPNQVYYRPMDEYSNQNNFVHDCVNITIKQHTVT |
| | TTTKGENFTETDVKMMERVIEQMCITQYERESQAYYQRGSSMVLFSSPPVI |
| | LLISFLIFLIVG (SEQ ID NO: 301) |
| E211Q | MANLGCWMLVLFVATWSDLGLCKKRPKPGGWNTGGSRYPGQGSPGGNR |
| | YPPQGGGGWGQPHGGGWGQPHGGGWGQPHGGGWGQPHGGGWGQGG |
| | GTHSQWNKPSKPKTNMKHMAGAAAAGAVVGGLGGYMLGSAMSRPIIHF |
| | GSDYEDRYYRENMHRYPNQVYYRPMDEYSNQNNFVHDCVNITIKQHTVT |
| | TTTKGENFTETDVKMMERVVQQMCITQYERESQAYYQRGSSMVLFSSPPV |
| | ILLISFLIFLIVG (SEQ ID NO: 302) |
| M232R | MANLGCWMLVLFVATWSDLGLCKKRPKPGGWNTGGSRYPGQGSPGGNR |
| | YPPQGGGGWGQPHGGGWGQPHGGGWGQPHGGGWGQPHGGGWGQGG |
| | GTHSQWNKPSKPKTNMKHMAGAAAAGAVVGGLGGYMLGSAMSRPIIHF |
| | GSDYEDRYYRENMHRYPNQVYYRPMDEYSNQNNFVHDCVNITIKQHTVT |
| | TTTKGENFTETDVKMMERVVEQMCITQYERESQAYYQRGSSRVLFSSPPVI |
| | LLISFLIFLIVG (SEQ ID NO: 303) |

[0758] Mutation sites relative to PRNP (NP_000302.1) (SEQ ID NO: 291) which are linked to GSS are reported, as follows:

| | AMINO ACID SEQUENCE OF MUTANT PRNP LINKED TO GSS PRION |
|---|---|
| | DISEASE (SEE TABLE 2 OF BAGYNSZKY ET AL., 2018) |
| MUTATION | (RELATIVE TO SEQ ID NO: 291 OF PRNP NP_000302.1) |
| P102L | MANLGCWMLVLFVATWSDLGLCKKRPKPGGWNTGGSRYPGQGSPGGNR |
| | YPPQGGGGWGQPHGGGWGQPHGGGWGQPHGGGWGQPHGGGWGQGG |
| | GTHSQWNKLSKPKTNMKHMAGAAAAGAVVGGLGGYMLGSAMSRPIIHF |
| | GSDYEDRYYRENMHRYPNQVYYRPMDEYSNQNNFVHDCVNITIKQHTVT |
| | TTTKGENFTETDVKMMERVVEQMCITQYERESQAYYQRGSSMVLFSSPPV |
| | ILLISFLIFLIVG (SEQ ID NO: 304) |
| P105L | MANLGCWMLVLFVATWSDLGLCKKRPKPGGWNTGGSRYPGQGSPGGNR |
| | YPPQGGGGWGQPHGGGWGQPHGGGWGQPHGGGWGQPHGGGWGQGG |
| | GTHSQWNKPSKLKTNMKHMAGAAAAGAVVGGLGGYMLGSAMSRPIIHF |
| | GSDYEDRYYRENMHRYPNQVYYRPMDEYSNQNNFVHDCVNITIKQHTVT |
| | TTTKGENFTETDVKMMERVVEQMCITQYERESQAYYQRGSSMVLFSSPPV |
| | ILLISFLIFLIVG (SEQ ID NO: 305) |
| A117V | MANLGCWMLVLFVATWSDLGLCKKRPKPGGWNTGGSRYPGQGSPGGNR |
| | YPPQGGGGWGQPHGGGWGQPHGGGWGQPHGGGWGQPHGGGWGQGG |
| | GTHSQWNKPSKPKTNMKHMAGAAVAGAVVGGLGGYMLGSAMSRPIIHF |
| | GSDYEDRYYRENMHRYPNQVYYRPMDEYSNQNNFVHDCVNITIKQHTVT |
| | TTTKGENFTETDVKMMERVVEQMCITQYERESQAYYQRGSSMVLFSSPPV |
| | ILLISFLIFLIVG (SEQ ID NO: 306) |
| G131V | MANLGCWMLVLFVATWSDLGLCKKRPKPGGWNTGGSRYPGQGSPGGNR |
| | YPPQGGGGWGQPHGGGWGQPHGGGWGQPHGGGWGQPHGGGWGQGG |
| | GTHSQWNKPSKPKTNMKHMAGAAAAGAVVGGLGGYMLVSAMSRPIIHF |
| | GSDYEDRYYRENMHRYPNQVYYRPMDEYSNQNNFVHDCVNITIKQHTVT |
| | TTTKGENFTETDVKMMERVVEQMCITQYERESQAYYQRGSSMVLFSSPPV |
| | ILLISFLIFLIVG (SEQ ID NO: 307) |
| V176G | MANLGCWMLVLFVATWSDLGLCKKRPKPGGWNTGGSRYPGQGSPGGNR |
| | YPPQGGGGWGQPHGGGWGQPHGGGWGQPHGGGWGQPHGGGWGQGG |
| | GTHSQWNKPSKPKTNMKHMAGAAAAGAVVGGLGGYMLGSAMSRPIIHF |
| | GSDYEDRYYRENMHRYPNQVYYRPMDEYSNQNNFGHDCVNITIKQHTVT |
| | TTTKGENFTETDVKMMERVVEQMCITQYERESQAYYQRGSSMVLFSSPPV |
| | ILLISFLIFLIVG (SEQ ID NO: 308) |
| H187R | MANLGCWMLVLFVATWSDLGLCKKRPKPGGWNTGGSRYPGQGSPGGNR |
| | YPPQGGGGWGQPHGGGWGQPHGGGWGQPHGGGWGQPHGGGWGQGG |
| | GTHSQWNKPSKPKTNMKHMAGAAAAGAVVGGLGGYMLGSAMSRPIIHF |
| | GSDYEDRYYRENMHRYPNQVYYRPMDEYSNQNNFVHDCVNITIKQRTVT |
| | TTTKGENFTETDVKMMERVVEQMCITQYERESQAYYQRGSSMVLFSSPPV |
| | ILLISFLIFLIVG (SEQ ID NO: 309) |
| | MANLGCWMLVLFVATWSDLGLCKKRPKPGGWNTGGSRYPGQGSPGGNR |
| | YPPQGGGGWGQPHGGGWGQPHGGGWGQPHGGGWGQPHGGGWGQGG |
| | GTHSQWNKPSKPKTNMKHMAGAAAAGAVVGGLGGYMLGSAMSRPIIHF |
| | GSDYEDRYYRENMHRYPNQVYYRPMDEYSNQNNFVHDCVNITIKQHTVT |
| | TTTKGENFTETDVKMMERVVEQMCITQYERESQAYYQRGSSMVLFSSPPV |
| | ILLISFLIFLIVG (SEQ ID NO: 291) |
| F198S | MANLGCWMLVLFVATWSDLGLCKKRPKPGGWNTGGSRYPGQGSPGGNR |
| | YPPQGGGGWGQPHGGGWGQPHGGGWGQPHGGGWGQPHGGGWGQGG |
| | GTHSQWNKPSKPKTNMKHMAGAAAAGAVVGGLGGYMLGSAMSRPIIHF |
| | GSDYEDRYYRENMHRYPNQVYYRPMDEYSNQNNFVHDCVNITIKQHTVT |
| | TTTKGENSTETDVKMMERVVEQMCITQYERESQAYYQRGSSMVLFSSPPV |
| | ILLISFLIFLIVG (SEQ ID NO: 311) |
| D202N | MANLGCWMLVLFVATWSDLGLCKKRPKPGGWNTGGSRYPGQGSPGGNR |
| | YPPQGGGGWGQPHGGGWGQPHGGGWGQPHGGGWGQPHGGGWGQGG |
| | GTHSQWNKPSKPKTNMKHMAGAAAAGAVVGGLGGYMLGSAMSRPIIHF |
| | GSDYEDRYYRENMHRYPNQVYYRPMDEYSNQNNFVHDCVNITIKQHTVT |
| | TTTKGENFTETNVKMMERVVEQMCITQYERESQAYYQRGSSMVLFSSPPV |
| | ILLISFLIFLIVG (SEQ ID NO: 312) |
| Q212P | MANLGCWMLVLFVATWSDLGLCKKRPKPGGWNTGGSRYPGQGSPGGNR |
| | YPPQGGGGWGQPHGGGWGQPHGGGWGQPHGGGWGQPHGGGWGQGG |
| | GTHSQWNKPSKPKTNMKHMAGAAAAGAVVGGLGGYMLGSAMSRPIIHF |
| | GSDYEDRYYRENMHRYPNQVYYRPMDEYSNQNNFVHDCVNITIKQHTVT |
| | TTTKGENFTETDVKMMERVVEPMCITQYERESQAYYQRGSSMVLFSSPPV |
| | ILLISFLIFLIVG (SEQ ID NO: 313) |
| Q217R | MANLGCWMLVLFVATWSDLGLCKKRPKPGGWNTGGSRYPGQGSPGGNR |
| | YPPQGGGGWGQPHGGGWGQPHGGGWGQPHGGGWGQPHGGGWGQGG |
| | GTHSQWNKPSKPKTNMKHMAGAAAAGAVVGGLGGYMLGSAMSRPIIHF |
| | GSDYEDRYYRENMHRYPNQVYYRPMDEYSNQNNFVHDCVNITIKQHTVT |
| | TTTKGENFTETDVKMMERVVEQMCITRYERESQAYYQRGSSMVLFSSPPV |
| | ILLISFLIFLIVG (SEQ ID NO: 314) |
| M232T | MANLGCWMLVLFVATWSDLGLCKKRPKPGGWNTGGSRYPGQGSPGGNR |
| | YPPQGGGGWGQPHGGGWGQPHGGGWGQPHGGGWGQPHGGGWGQGG |
| | GTHSQWNKPSKPKTNMKHMAGAAAAGAVVGGLGGYMLGSAMSRPIIHF |
| | GSDYEDRYYRENMHRYPNQVYYRPMDEYSNQNNFVHDCVNITIKQHTVT |
| | TTTKGENFTETDVKMMERVVEQMCITQYERESQAYYQRGSSTVLFSSPPVI |
| | LLISFLIFLIVG (SEQ ID NO: 315) |

[0759] Mutation sites relative to PRNP (NP_000302.1) (SEQ ID NO: 291) which are linked to a possible protective nature against prion disease, as follows:

| | AMINO ACID SEQUENCE OF MUTANT PRNP LINKED TO A PROTECTIVE |
|---|---|
| | NATURE AGAINST PRION DISEASE (SEE TABLE 4 OF BAGYNSZKY ET |
| MUTATION | AL., 2018) (RELATIVE TO SEQ ID NO: 291 OF PRNP NP_000302.1) |
| G127S | MANLGCWMLVLFVATWSDLGLCKKRPKPGGWNTGGSRYPGQGSPGGNR |
| | YPPQGGGGWGQPHGGGWGQPHGGGWGQPHGGGWGQPHGGGWGQGG |
| | GTHSQWNKPSKPKTNMKHMAGAAAAGAVVGGLGSYMLGSAMSRPIIHF |
| | GSDYEDRYYRENMHRYPNQVYYRPMDEYSNQNNFVHDCVNITIKQHTVT |
| | TTTKGENFTETDVKMMERVVEQMCITQYERESQAYYQRGSSMVLFSSPPV |
| | ILLISFLIFLIVG (SEQ ID NO: 316) |
| G127V | MANLGCWMLVLFVATWSDLGLCKKRPKPGGWNTGGSRYPGQGSPGGNR |
| | YPPQGGGGWGQPHGGGWGQPHGGGWGQPHGGGWGQPHGGGWGQGG |
| | GTHSQWNKPSKPKTNMKHMAGAAAAGAVVGGLGVYMLGSAMSRPIIHF |
| | GSDYEDRYYRENMHRYPNQVYYRPMDEYSNQNNFVHDCVNITIKQHTVT |
| | TTTKGENFTETDVKMMERVVEQMCITQYERESQAYYQRGSSMVLFSSPPV |
| | ILLISFLIFLIVG (SEQ ID NO: 317) |
| M129V | MANLGCWMLVLFVATWSDLGLCKKRPKPGGWNTGGSRYPGQGSPGGNR |
| | YPPQGGGGWGQPHGGGWGQPHGGGWGQPHGGGWGQPHGGGWGQGG |
| | GTHSQWNKPSKPKTNMKHMAGAAAAGAVVGGLGGYVLGSAMSRPIIHF |
| | GSDYEDRYYRENMHRYPNQVYYRPMDEYSNQNNFVHDCVNITIKQHTVT |
| | TTTKGENFTETDVKMMERVVEQMCITQYERESQAYYQRGSSMVLFSSPPV |
| | ILLISFLIFLIVG (SEQ ID NO: 318) |
| D167G | MANLGCWMLVLFVATWSDLGLCKKRPKPGGWNTGGSRYPGQGSPGGNR |
| | YPPQGGGGWGQPHGGGWGQPHGGGWGQPHGGGWGQPHGGGWGQGG |
| | GTHSQWNKPSKPKTNMKHMAGAAAAGAVVGGLGGYMLGSAMSRPIIHF |
| | GSDYEDRYYRENMHRYPNQVYYRPMGEYSNQNNFVHDCVNITIKQHTVT |
| | TTTKGENFTETDVKMMERVVEQMCITQYERESQAYYQRGSSMVLFSSPPV |
| | ILLISFLIFLIVG (SEQ ID NO: 319) |
| D167N | MANLGCWMLVLFVATWSDLGLCKKRPKPGGWNTGGSRYPGQGSPGGNR |
| | YPPQGGGGWGQPHGGGWGQPHGGGWGQPHGGGWGQPHGGGWGQGG |
| | GTHSQWNKPSKPKTNMKHMAGAAAAGAVVGGLGGYMLGSAMSRPIIHF |
| | GSDYEDRYYRENMHRYPNQVYYRPMNEYSNQNNFVHDCVNITIKQHTVT |
| | TTTKGENFTETDVKMMERVVEQMCITQYERESQAYYQRGSSMVLFSSPPV |
| | ILLISFLIFLIVG (SEQ ID NO: 320) |
| N171S | MANLGCWMLVLFVATWSDLGLCKKRPKPGGWNTGGSRYPGQGSPGGNR |
| | YPPQGGGGWGQPHGGGWGQPHGGGWGQPHGGGWGQPHGGGWGQGG |
| | GTHSQWNKPSKPKTNMKHMAGAAAAGAVVGGLGGYMLGSAMSRPIIHF |
| | GSDYEDRYYRENMHRYPNQVYYRPMDEYSSQNNFVHDCVNITIKQHTVT |
| | TTTKGENFTETDVKMMERVVEQMCITQYERESQAYYQRGSSMVLFSSPPV |
| | ILLISFLIFLIVG (SEQ ID NO: 321) |
| E219K | MANLGCWMLVLFVATWSDLGLCKKRPKPGGWNTGGSRYPGQGSPGGNR |
| | YPPQGGGGWGQPHGGGWGQPHGGGWGQPHGGGWGQPHGGGWGQGG |
| | GTHSQWNKPSKPKTNMKHMAGAAAAGAVVGGLGGYMLGSAMSRPIIHF |
| | GSDYEDRYYRENMHRYPNQVYYRPMDEYSNQNNFVHDCVNITIKQHTVT |
| | TTTKGENFTETDVKMMERVVEQMCITQYKRESQAYYQRGSSMVLFSSPPV |
| | ILLISFLIFLIVG (SEQ ID NO: 322) |
| P238S | MANLGCWMLVLFVATWSDLGLCKKRPKPGGWNTGGSRYPGQGSPGGNR |
| | YPPQGGGGWGQPHGGGWGQPHGGGWGQPHGGGWGQPHGGGWGQGG |
| | GTHSQWNKPSKPKTNMKHMAGAAAAGAVVGGLGGYMLGSAMSRPIIHF |
| | GSDYEDRYYRENMHRYPNQVYYRPMDEYSNQNNFVHDCVNITIKQHTVT |
| | TTTKGENFTETDVKMMERVVEQMCITQYERESQAYYQRGSSMVLFSSSPV |
| | ILLISFLIFLIVG (SEQ ID NO: 323) |

[0760] Thus, in various embodiments, prime editing may be used to remove a mutation in PRNP that is linked to prion disease or install a mutation in PRNP that is considered to be protective against prion disease. For example, prime editing may be use to remove or restore a D178N, V180I, T188K, E196K, E196A, E200K, E200G, V203I, R208H, V210I, E211Q, I215V, or M232R mutation in the PRNP protein (relative to PRNP of NP_000302.1) (SEQ ID NO: 291). In other embodiments, prime editing may be use to remove or restore a P102L, P105L, A117V, G131V, V176G, H187R, F198S, D202N, Q212P, Q217R, or M232T mutation in the PRNP protein (relative to PRNP of NP_000302.1) (SEQ ID NO: 291). By removing or correcting for the presence of such mutations in PRNP using prime editing, the risk of prion disease may be reduced or eliminated.

[0761] In other embodiments, prime editing may be used to install a protective mutation in PRNP that is linked to a protective effect against one or more prion diseases. For example, prime editing may be used to install a G127S, G127V, M129V, D167G, D167N, N171S, E219K, or P238S protective mutation in PRNP (relative to PRNP of NP_000302.1) (SEQ ID NO: 291). In still other embodiments, the protective mutation may be any alternate amino acid installed at G127, G127, M129, D167, D167, N171, E219, or P238 in PRNP (relative to PRNP of NP_000302.1) (SEQ ID NO: 291).

[0762] In particular embodiments, prime editing may be used to install a G127V protective mutation in PRNP, as illustrated in FIG. 27 and discussed in Example 5.

[0763] In another embodiment, prime editing may be used to install an E219K protective mutation in PRNP.

[0764] The PRNP protein and the protective mutation site are conserved in mammals, so in addition to treating human disease it could also be used to generate cows and sheep that are immune to prion disease, or even help cure wild populations of animals that are suffering from prion disease. Prime editing has already been used to achieve ˜25% installation of a naturally occurring protective allele in human cells, and previous mouse experiments indicate that this level of installation is sufficient to cause immunity from most prion diseases. This method is the first and potentially only current way to install this allele with such high efficiency in most cell types. Another possible strategy for treatment is to use prime editing to reduce or eliminate the expression of PRNP by installing an early stop codon in the gene.

[0765] Using the principles described herein for PEgRNA design, appropriate PEgRNAs may be designed for installing desired protective mutations, or for removing prion disease-associated mutations from PRNP. For example, the below list of PEgRNAs can be used to install the G127V protective allele and the E219K protective allele in human PRNP, as well as the G127V protective allele in PRNP of various animals.

| HUMAN PEGRNA FOR | GCAGTGGTGGGGGGCCTTGGGTTTTAGAGCTAGAA |
|---|---|
| INSTALLATION OF G127V | ATAGCAAGTTAAAATAAGGCTAGTCCGTTATCAACTTG |
| IN HUMAN PRNP: | [chemical structure] |
| | [chemical structure] |
| HUMAN PEGRNA FOR | TGTGTATCACCCAGTACGAGGTTTTAGAGCTAGAAA |
| INSTALLATION OF E219K | TAGCAAGTTAAAATAAGGCTAGTCCGTTATCAACTTGA |
| IN HUMAN PRNP | AAAAGTGGCACCGAGTCGGTGC AGATTCTCTCTT |
| | [chemical structure] |
| COW (BOS TAURUS) | GCAGTGGTAGGGGGCCTTGGGTTTTAGAGCTAGAA |
| PEGRNA FOR | ATAGCAAGTTAAAATAAGGCTAGTCCGTTATCAACTTG |
| INSTALLATION OF G127V | [chemical structure] |
| IN COW PRNP | [chemical structure] |
| HAMSTER | GCCGTGGTGGGGGGCCTTGGGTTTTAGAGCTAGAA |
| (MESOCRICETUS | ATAGCAAGTTAAAATAAGGCTAGTCCGTTATCAACTTG |
| AURATUS) PEGRNA FOR | [chemical structure] |
| INSTALLATION OF G127V IN HAMSTER PRNP | [chemical structure] |
| MOUSE (MUS | GCAGTAGTGGGGGGCCTTGGGTTTTAGAGCTAGAA |
| MUSCULUS) PEGRNA | ATAGCAAGTTAAAATAAGGCTAGTCCGTTATCAACTTG |
| FOR INSTALLATION OF | [chemical structure] |
| G127V IN MOUST PRNP | [chemical structure] |
| DEER (ODOCOILEUS | GCAGTGGTAGGGGGCCTTGGGTTTTAGAGCTAGAA |
| VIRGINIANUS) PEGRNA | ATAGCAAGTTAAAATAAGGCTAGTCCGTTATCAACTTG |
| FOR INSTALLATION OF | [chemical structure] |
| G127V IN DEER PNRP | [chemical structure] |
| FERRET (MUSTELA | GCGGTTGTGGGGGGCCTGGGGTTTTAGAGCTAGAA |
| PUTORIUS FURO) | ATAGCAAGTTAAAATAAGGCTAGTCCGTTATCAACTTG |
| PEGRNA FOR | [chemical structure] |
| INSTALLATION OF G127V IN FERRET PRNP | [chemical structure] |
| KEY: | SPACER IS BOLDED. |
| | SGRNA SCAFFOLD IS NORMAL TEXT. |
| | RT TEMPLATE IS ONCE UNDERLINED. |
| | PBS IS TWICE UNDERLINED. |

[0766] F. Use of Prime Editing for RNA Tagging

[0767] Prime editing may also be used to manipulate, alter, and otherwise modify the sequences of DNA encoding RNA functions through RNA tagging, and in this way provides a means to indirectly modify the structure and function of RNA. For example, PE can be used to insert motifs that are functional at the RNA level (hereafter RNA motifs) to tag or otherwise manipulate non-coding RNAs or mRNAs. These motifs could serve to increase gene expression, decrease gene expression, alter splicing, change post-transcriptional modification, affect the sub-cellular location of the RNA, enable isolation or determination of the intra- or extra-cellular location of the RNA (using, for instance, fluorescent RNA aptamers such as Spinach, Spinach2, Baby Spinach, or Broccoli), recruit endogenous or exogenous protein or RNA binders, introduce sgRNAs, or induce processing of the RNA, by either self-cleavage or RNAses (see FIG. 28B and Example 6 for further details).

[0768] The following RNA tags or motifs may be inserted into a gene of interest using prime editing with an appropriate PEgRNA (designed using the guidance provided herein) to affect various properties of RNA, including RNA transport, expression level, splicing, and detection.

| | | | EXEMPLARY |
|---|---|---|---|
| | | | PEGRNA FOR PRIME |
| | | | EDITING INSERTION |
| | | | OF RNA MOTIF INTO |
| | | FUNCTION/ | THE EXEMPLARY |
| RNA MOTIF | SEQUENCE OF RNA MOTIF | EFFECT | HEXA GENE* |
| POLYOMAVIRUS | AACTTGTTTATTGCAGCTT | TERMINATION | ATCCTTCCAGTCAG |
| SIMIAN | ATAATGGTTACAAATAAAG | OF | GGCCATGTTTGAGA |
| VIRUS 40 | CAATAGCATCACAAATTTC | TRANSCRIPTION | GCTAGAAATAGCAA |
| (SV40) TYPE1 | ACAAATAAAGCATTTTTTT | OF THE | GTTTAAATAAGGCT |
| | CACTGCATTCTAGTTGTGG | TAGGED | AGTCCGTTATCAAC |
| | TTTGTCCAAACTCATCAAT | GENE; | TTGAAAAAGTGGG |
| | GTATCTTA (SEQ ID NO: | TRANSPORT | ACCGAGTCGGTCCA |
| | 331) | OF MRNA | CCTGAACCGTATATC |
| | | INTO | TAAGATACATTGAT |
| | | CYTOSOL; | GAGTTTGGACAAA |
| | | INCREASED | CCACAACTAGAAT |
| | | RNA | GCAGTGAAAAAAA |
| | | STABILITY | TGCTTTATTTGTG |
| | | AND | AAATTTGTGATGC |
| | | EXPRESSION | TATTGCTTTATTTG |
| | | OF ENCODED | TAACCATTATAAGC |
| | | PROTEIN | TGCAATAAACAAG |
| | | | TTCTATGGCCCTGA |
| | | | CTGGAA |
| | | | (SEQ ID NO: 332) |
| POLYOMAVIRUS | CCATGGCCCAACTTGTTTA | TERMINATION | ATCCTTCCAGTCAG |
| SIMIAN | TTGCAGCTTATAATGGTTA | OF | GGCCATGTTTGAGA |
| VIRUS 40 | CAAATAAAGCAATAGCAT | TRANSCRIPTION | GCTAGAAATAGCAA |
| (SV40) TYPE2 | CACAAATTTCACAAATAA | OF THE | GTTTAAATAAGGCT |
| | AGCATTTTTTTCACTGCAT | TAGGED | AGTCCGTTATCAAC |
| | TCTAGTTGTGGTTTGTCCA | GENE; | TTGAAAAAGTGGG |
| | AACTCATCAATGTATCTTA | TRANSPORT | ACCGAGTCGGTCCA |
| | TCATGTCTGGATCTC (SEQ | OF MRNA | CCTGAACCGTATATC |
| | ID NO: 333) | INTO | GAGATCCAGACAT |
| | | CYTOSOL; | GATAAGATACATT |
| | | INCREASED | GATGAGTTTGGAC |
| | | RNA | AAACCACAACTAG |
| | | STABILITY | AATGCAGTGAAAA |
| | | AND | AAATGCTTTATTT |
| | | EXPRESSION | GTGAAATTTGTGA |
| | | OF ENCODED | TGCTATTGCTTTAT |
| | | PROTEIN | TTGTAACCATTATA |
| | | | AGCTGCAATAAAC |
| | | | AAGTTGGGCCATG |
| | | | GCTATGGCCCTGAC |
| | | | TGGAA |
| | | | (SEQ ID NO: 334) |
| POLYOMAVIRUS | TGATCATAATCAAGCCATA | TERMINATION | ATCCTTCCAGTCAG |
| SIMIAN | TCACATCTGTAGAGGTTTA | OF | GGCCATGTTTGAGA |
| VIRUS 40 | CTTGCTTTAAAAAACCTC | TRANSCRIPTION | GCTAGAAATAGCAA |
| (SV40) TYPE3 | CACACCTCCCCCTGAACC | OF THE | GTTTAAATAAGGCT |
| | TGAAACATAAAATGAATG | TAGGED | AGTCCGTTATCAAC |
| | CAATTGTTGTTGTTAACTT | GENE; | TTGAAAAAGTGGG |
| | GTTTATTGCAGCTTATAAT | TRANSPORT | ACCGAGTCGGTCCA |
| | GGTTACAAATAAAGCAAT | OF MRNA | CCTGAACCGTATATC |
| | AGCATCACAAATTTCACA | INTO | GCAGATCCAGACA |
| | AATAAAGCATTTTTTTCAC | CYTOSOL; | TGATAAGATACATT |
| | TGCATTCTAGTTGTGGTTT | INCREASED | GATGAGTTTGGAC |
| | GTCCAAACTCATCAATGTA | RNA | AAACCACAACTAG |
| | TCTTATCATGTCTGGATCT | STABILITY | AATGCAGTGAAAA |
| | GC (SEQ ID NO: 335) | AND | AAATGCTTTATTT |
| | | EXPRESSION | GTGAAATTTGTGA |
| | | OF ENCODED | TGCTATTGCTTTAT |
| | | PROTEIN | TTGTAACCATTATA |
| | | | AGCTGCAATAAAC |
| | | | AAGTTAACAACAA |
| | | | CAATTGCATTCAT |
| | | | TTTATGTTTCAGG |
| | | | TTCAGGGGGAGG |
| | | | TGTGGAGGTTTTT |
| | | | TAAAGCAAGTAAA |
| | | | CCTCTACAGATGT |
| | | | GATATGGCTTGAT |
| | | | TATGATCACTATGG |
| | | | CCCTGACTGGAA |
| | | | (SEQ ID NO: 336) |
| HUMAN | ACGGGTGGCATCCCTGTG | TRANSPORT | ATCCTTCCAGTCAG |
| GROWTH | ACCCCTCCCCAGTGCCTC | OF RNA INTO | GGCCATGTTTGAGA |
| HORMONE | TCCTGGCCCTGGAAGTTG | CYTOPLASM; | GCTAGAAATAGCAA |
| (HGH) | CCACTCCAGTGCCCACCA | ENHANCED | GTTTAAATAAGGCT |
| | GCCTTGTCCTAATAAAATT | RNA | AGTCCGTTATCAAC |
| | AAGTTGCATCATTTTGTCT | STABILITY | TTGAAAAAGTGGG |
| | GACTAGGTGTCCTTCTATA | AND | ACCGAGTCGGTCCA |
| | ATATTATGGGGTGGAGGG | EXPRESSION | CCTGAACCGTATATC |
| | GGGTGGTATGGAGCAAGG | OF ENCODED | AAGGACAGGGAA |
| | GGCAAGTTGGGAAGACA | PROTEIN | GGGAGCAGTGGT |
| | ACCTGTAGGGCCTGCGGG | | TCACGCCTGTAAT |
| | GTCTATTGGGAACCAAGC | | CCCAGCAATTTGG |
| | TGGAGTGCAGTGGCACAA | | GAGGCCAAGGTG |
| | TCTTGGCTCACTGCAATCT | | GGTAGATCACCTG |
| | CCGCCTCCTGGGTTCAAG | | AGATTAGGAGTTG |
| | CGATTCTCCTGCCTCAGCC | | GAGACCAGCCTG |
| | TCCCGAGTTGTTGGGATT | | GCCAATATGGTGA |
| | CCAGGCATGCATGACCAG | | AACCCCGTCTCTA |
| | GCTCAGCTAATTTTTGTTT | | CCAAAAAAACAAA |
| | TTTTGGTAGAGACGGGGT | | AATTAGCTGAGCC |
| | TTCACCATATTGGCCAGGC | | TGGTCATGCATGC |
| | TGGTCTCCAACTCCTAATC | | CTGGAATCCCAAC |
| | TCAGGTGATCTACCCACCT | | AACTCGGGAGGCT |
| | TGGCCTCCCAAATTGCTG | | GAGGCAGGAGAAT |
| | GGATTACAGGCGTGAACC | | CGCTTGAACCCAG |
| | ACTGCTCCCTTCCCTGTCC | | GAGGCGGAGATTG |
| | TT (SEQ ID NO: 337) | | CAGTGAGCCAAGA |
| | | | TTGTGCCACTGCA |
| | | | CTCCAGCTTGGTT |
| | | | CCCAATAGACCCC |
| | | | GCAGGCCCTACAG |
| | | | GTTGTCTTCCCAA |
| | | | CTTGCCCCTTGCT |
| | | | CCATACCACCCCC |
| | | | CTCCACCCCATAA |
| | | | TATTATAGAAGGA |
| | | | CACCTAGTCAGAC |
| | | | AAAATGATGCAAC |
| | | | TTAATTTTATTAGG |
| | | | ACAAGGCTGGTG |
| | | | GGCACTGGAGTG |
| | | | GCAACTTCCAGGG |
| | | | CCAGGAGAGGCA |
| | | | CTGGGGAGGGGT |
| | | | CACAGGGATGCCA |
| | | | CCCGTCTATGGCCC |
| | | | TGACTGGAA |
| | | | (SEQ ID NO: 338) |
| BOVINE | CGACTGTGCCTTCTAGTTG | TRANSPORT | ATCCTTCCAGTCAG |
| GROWTH | CCAGCCATCTGTTGTTTGC | OF RNA INTO | GGCCATGTTTGAGA |
| HORMONE | CCCTCCCCCGTGCCTTCCT | CYTOPLASM; | GCTAGAAATAGCAA |
| (BGH) | TGACCCTGGAAGGTGCCA | ENHANCED | GTTTAAATAAGGCT |
| | CTCCCACTGTCCTTTCCTA | RNA | AGTCCGTTATCAAC |
| | ATAAAATGAGGAAATTGC | STABILITY | TTGAAAAAGTGGG |
| | ATCGCATTGTCTGAGTAGG | AND | ACCGAGTCGGTCCA |
| | TGTCATTCTATTCTGGGGG | EXPRESSION | CCTGAACCGTATATC |
| | GTGGGGTGGGGCAGGAC | OF ENCODED | CCATAGAGCCCAC |
| | AGCAAGGGGGAGGATTG | PROTEIN | CGCATCCCCAGCA |
| | GGAAGACAATAGCAGGCA | | TGCCTGCTATTGT |
| | TGCTGGGGATGCGGTGGG | | CTTCCCAATCCTC |
| | CTCTATGG (SEQ ID NO: | | CCCCTTGCTGTCC |
| | 339) | | TGCCCCACCCCAC |
| | | | CCCCCAGAATAGA |
| | | | ATGACACCTACTC |
| | | | AGACAATGCGATG |
| | | | CAATTTCCTCATTT |
| | | | TATTAGGAAAGGA |
| | | | CAGTGGGAGTGG |
| | | | CACCTTCCAGGGT |
| | | | CAAGGAAGGCAC |
| | | | GGGGGAGGGGCA |
| | | | AACAACAGATGGC |
| | | | TGGCAACTAGAAG |
| | | | GCACAGTCGCTAT |
| | | | GGCCCTGACTGGAA |
| | | | (SEQ ID NO: 340) |
| RABBIT | TTCACTCCTCAGGTGCAG | TRANSPORT | ATCCTTCCAGTCAG |
| BETA- | GCTGCCTATCAGAAGGTG | OF RNA INTO | GGCCATGTTTGAGA |
| GLOBIN | GTGGCTGGTGTGGCCAAT | CYTOPLASM; | GCTAGAAATAGCAA |
| (RBGLOB) | GCCCTGGCTCACAAATAC | ENHANCED | GTTTAAATAAGGCT |
| | CACTGAGATCTTTTTCCCT | RNA | AGTCCGTTATCAAC |
| | CTGCCAAAAATTATGGGG | STABILITY | TTGAAAAAGTGGG |
| | ACATCATGAAGCCCCTTG | AND | ACCGAGTCGGTCCA |
| | AGCATCTGACTTCTGGCTA | EXPRESSION | CCTGAACCGTATATC |
| | ATAAAGGAAATTTATTTTC | OF ENCODED | GATCTCCATAAGA |
| | ATTGCAATAGTGTGTTGGA | PROTEIN | GAAGAGGGACAG |
| | ATTTTTTGTGTCTCTCACT | | CTATGACTGGGAG |
| | CGGAAGGACATATGGGAG | | TAGTCAGGAGAGG |
| | GGCAAATCATTTAAAACAT | | AGGAAAAATCTGG |
| | CAGAATGAGTATTTGGTTT | | CTAGTAAAACATG |
| | AGAGTTTGGCAACATATG | | TAAGGAAAATTTT |
| | CCCATATGCTGGCTGCCAT | | AGGGATGTTAAAG |
| | GAACAAAGGTTGGCTATA | | AAAAAAATAACAC |
| | AAGAGGTCATCAGTATATG | | AAAACAAAATATA |
| | AAACAGCCCCCTGCTGTC | | AAAAAAATCTAAC |
| | CATTCCTTATTCCATAGAA | | CTCAAGTCAAGGC |
| | AAGCCTTGACTTGAGGTT | | TTTTCTATGGAATA |
| | AGATTTTTTTTATATTTTGT | | AGGAATGGACAGC |
| | TTTGTGTTATTTTTTTCTTT | | AGGGGGCTGTTTC |
| | AACATCCCTAAAATTTTCC | | ATATACTGATGAC |
| | TTACATGTTTTACTAGCCA | | CTCTTTATAGCCA |
| | GATTTTTCCTCCTCTCCTG | | ACCTTTGTTCATG |
| | ACTACTCCCAGTCATAGCT | | GCAGCCAGCATAT |
| | GTCCCTCTTCTCTTATGGA | | GGGCATATGTTGC |
| | GATC (SEQ ID NO: 341) | | CAAACTCTAAACC |
| | | | AAATACTCATTCT |
| | | | GATGTTTTAAATG |
| | | | ATTTGCCCTCCCA |
| | | | TATGTCCTTCCGA |
| | | | GTGAGAGACACAA |
| | | | AAAATTCCAACAC |
| | | | ACTATTGCAATGA |
| | | | AAATAAATTTCCTT |
| | | | TATTAGCCAGAAG |
| | | | TCAGATGCTCAAG |
| | | | GGGCTTCATGATG |
| | | | TCCCCATAATTTTT |
| | | | GGCAGAGGGAAA |
| | | | AAGATCTCAGTGG |
| | | | TATTTGTGAGCCA |
| | | | GGGCATTGGCCAC |
| | | | ACCAGCCACCACC |
| | | | TTCTGATAGGCAG |
| | | | CCTGCACCTGAGG |
| | | | AGTGAACTATGGCC |
| | | | CTGACTGGAA |
| | | | (SEQ ID NO: 342) |
| THYMIDINE | GGGGGAGGCTAACTGAAA | TRANSPORT | ATCCTTCCAGTCAG |
| KINASE (TK) | CACGGAAGGAGACAATAC | OF RNA INTO | GGCCATGTTTGAGA |
| | CGGAAGGAACCCGCGCTA | CYTOPLASM; | GCTAGAAATAGCAA |
| | TGACGGCAATAAAAAGAC | ENHANCED | GTTTAAATAAGGCT |
| | AGAATAAAACGCACGGGT | RNA | AGTCCGTTATCAAC |
| | GTTGGGTCGTTTGTTCATA | STABILITY | TTGAAAAAGTGGG |
| | AACGCGGGGTTCGGTCCC | AND | ACCGAGTCGGTCCA |
| | AGGGCTGGCACTCTGTCG | EXPRESSION | CCTGAACCGTATATC |
| | ATACCCCACCGAGACCCC | OF ENCODED | CTATGGCAGGGCC |
| | ATTGGGGCCAATACGCCC | PROTEIN | TGCCGCCCCGACG |
| | GCGTTTCTTCCTTTTCCCC | | TTGGCTGCGAGCC |
| | ACCCCACCCCCCAAGTTC | | CTGGGCCTTCACC |
| | GGGTGAAGGCCCAGGGCT | | CGAACTTGGGGG |
| | CGCAGCCAACGTCGGGGC | | GTGGGGTGGGGA |
| | GGCAGGCCCTGCCATAG | | AAAGGAAGAAAC |
| | (SEQ ID NO: 343) | | GCGGGCGTATTGG |
| | | | CCCCAATGGGGTC |
| | | | TCGGTGGGGTATC |
| | | | GACAGAGTGCCA |
| | | | GCCCTGGGACCG |
| | | | AACCCCGCGTTTA |
| | | | TGAACAAACGACC |
| | | | CAACACCCGTGCG |
| | | | TTTTATTCTGTCTT |
| | | | TTTATTGCCGTCA |
| | | | TAGCGCGGGTTCC |
| | | | TTCCGGTATTGTC |
| | | | TCCTTCCGTGTTT |
| | | | CAGTTAGCCTCCC |
| | | | CCCTATGGCCCTGA |
| | | | CTGGAA |
| | | | (SEQ ID NO: 344) |
| MALAT1 ENE- | TAGGGTCATGAAGGTTTTT | RESULTS IN | ATCCTTCCAGTCAG |
| MASCRNA | CTTTTCCTGAGAAAACAA | RETENTION | GGCCATGTTTGAGA |
| | CACGTATTGTTTTCTCAGG | OF RNA IN | GCTAGAAATAGCAA |
| | TTTTGCTTTTTGGCCTTTT | NUCLEUS, | GTTTAAATAAGGCT |
| | TCTAGCTTAAAAAAAAAA | TRANSCRIPT | AGTCCGTTATCAAC |
| | AAAGCAAAAGATGCTGGT | TERMINATION | TTGAAAAAGTGGG |
| | GGTTGGCACTCCTGGTTT | AND | ACCGAGTCGGTCCA |
| | CCAGGACGGGGTTCAAAT | STABILIZATION | CCTGAACCGTATATC |
| | CCCTGCGGCGTCTTTGCTT | | AGTCAAAGCAAAG |
| | TGACT (SEQ ID NO: 345) | | ACGCCGCAGGGAT |
| | | | TTGAACCCCGTCC |
| | | | TGGAAACCAGGA |
| | | | GTGCCAACCACCA |
| | | | GCATCTTTTGCTT |
| | | | TTTTTTTTTTTAAG |
| | | | CTAGAAAAAGGCC |
| | | | AAAAAGCAAAACC |
| | | | TGAGAAAACAATA |
| | | | CGTGTTGTTTTCT |
| | | | CAGGAAAAGAAAA |
| | | | ACCTTCATGACCC |
| | | | TACTATGGCCCTGA |
| | | | CTGGAA |
| | | | (SEQ ID NO: 346) |
| KSHV PAN | TGTTTTGGCTGGGTTTTTC | RESULTS IN | ATCCTTCCAGTCAG |
| ENE | CTTGTTCGCACCGGACAC | RETENTION | GGCCATGTTTGAGA |
| | CTCCAGTGACCAGACGGC | OF RNA IN | GCTAGAAATAGCAA |
| | AAGGTTTTTATCCCAGTGT | NUCLEUS, | GTTTAAATAAGGCT |
| | ATATTGGAAAAACATGTTA | TRANSCRIPT | AGTCCGTTATCAAC |
| | TACTTTTGACAATTTAACG | TERMINATION | TTGAAAAAGTGGG |
| | TGCCTAGAGCTCAAATTA | AND | ACCGAGTCGGTCCA |
| | AACTAATACCATAACGTAA | STABILIZATION | CCTGAACCGTATATC |
| | TGCAACTTACAACATAAAT | | TTTTTTTTTTTTTT |
| | AAAGGTCAATGTTTAATCC | | TTTTTATGGATTAA |
| | ATAAAAAAAAAAAAAAA | | ACATTGACCTTTA |
| | AAAA (SEQ ID NO: 347) | | TTTATGTTGTAAG |
| | | | TTGCATTACGTTAT |
| | | | GGTATTAGTTTAAT |
| | | | TTGAGCTCTAGGC |
| | | | ACGTTAAATTGTC |
| | | | AAAAGTATAACAT |
| | | | GTTTTTCCAATATA |
| | | | CACTGGGATAAAA |
| | | | ACCTTGCCGTCTG |
| | | | GTCACTGGAGGTG |
| | | | TCCGGTGCGAACA |
| | | | AGGAAAAACCCAG |
| | | | CCAAAACACTATG |
| | | | GCCCTGACTGGAA |
| | | | (SEQ ID NO: 348) |
| THREE, | TGTTTTGGCTGGGTTTTTC | RESULTS IN | ATCCTTCCAGTCAG |
| SEQUENTIAL | CTTGTTCGCACCGGACAC | RETENTION | GGCCATGTTTGAGA |
| KSHV PAN | CTCCAGTGACCAGACGGC | OF RNA IN | GCTAGAAATAGCAA |
| ENES WITH | AAGGTTTTTATCCCAGTGT | NUCLEUS, | GTTTAAATAAGGCT |
| SHORT, | ATATTGGAAAAACATGTTA | TRANSCRIPT | AGTCCGTTATCAAC |
| UNCONSERVED | TACTTTTGACAATTTAACG | TERMINATION | TTGAAAAAGTGGG |
| RNA | TGCCTAGAGCTCAAATTA | AND | ACCGAGTCGGTCCA |
| LINKERS | AACTAATACCATAACGTAA | STABILIZATION, | CCTGAACCGTATATC |
| | TGCAACTTACAACATAAAT | PREDICTED | TTTTTTTTTTTTTT |
| | AAAGGTCAATGTTTAATCC | TO BE | TTTTTATGGATTAA |
| | ATAAAAAAAAAAAAAAA | GREATER | ACATTGACCTTTA |
| | AAAAACACACTGTTTTGG | THAN A | TTTATGTTGTAAG |
| | CTGGGTTTTTCCTTGTTCG | SINGLE PAN | TTGCATTACGTTAT |
| | CACCGGACACCTCCAGTG | ENE | GGTATTAGTTTAAT |
| | ACCAGACGGCAAGGTTTT | | TTGAGCTCTAGGC |
| | TATCCCAGTGTATATTGGA | | ACGTTAAATTGTC |
| | AAAACATGTTATACTTTTG | | AAAAGTATAACAT |
| | ACAATTTAACGTGCCTAG | | GTTTTTCCAATATA |
| | AGCTCAAATTAAACTAATA | | CACTGGGATAAAA |
| | CCATAACGTAATGCAACTT | | ACCTTGCCGTCTG |
| | ACAACATAAATAAAGGTC | | GTCACTGGAGGTG |
| | AATGTTTAATCCATAAAAA | | TCCGGTGCGAACA |
| | AAAAAAAAAAAAAATCTC | | AGGAAAAACCCAG |
| | TCTGTTTTGGCTGGGTTTT | | CCAAAACAGAGAG |
| | TCCTTGTTCGCACCGGAC | | ATTTTTTTTTTTTT |
| | ACCTCCAGTGACCAGACG | | TTTTTTATGGATTA |
| | GCAAGGTTTTTATCCCAGT | | AACATTGACCTTT |
| | GTATATTGGAAAAACATGT | | ATTTATGTTGTAAG |
| | TATACTTTTGACAATTTAA | | TTGCATTACGTTAT |
| | CGTGCCTAGAGCTCAAAT | | GGTATTAGTTTAAT |
| | TAAACTAATACCATAACGT | | TTGAGCTCTAGGC |
| | AATGCAACTTACAACATA | | ACGTTAAATTGTC |
| | AATAAAGGTCAATGTTTA | | AAAAGTATAACAT |
| | ATCCATAAAAAAAAAAAA | | GTTTTTCCAATATA |
| | AAAAAAA (SEQ ID NO: | | CACTGGGATAAAA |
| | 349) | | ACCTTGCCGTCTG |
| | | | GTCACTGGAGGTG |
| | | | TCCGGTGCGAACA |
| | | | AGGAAAAACCCAG |
| | | | CCAAAACAGTGTG |
| | | | TTTTTTTTTTTTTT |
| | | | TTTTTTATGGATTA |
| | | | AACATTGACCTTT |
| | | | ATTTATGTTGTAAG |
| | | | TTGCATTACGTTAT |
| | | | GGTATTAGTTTAAT |
| | | | TTGAGCTCTAGGC |
| | | | ACGTTAAATTGTC |
| | | | AAAAGTATAACAT |
| | | | GTTTTTCCAATATA |
| | | | CACTGGGATAAAA |
| | | | ACCTTGCCGTCTG |
| | | | GTCACTGGAGGTG |
| | | | TCCGGTGCGAACA |
| | | | AGGAAAAACCCAG |
| | | | CCAAAACACTATG |
| | | | GCCCTGACTGGAA |
| | | | (SEQ ID NO: 350) |
| SMBOX/U1 | CAGCAAGTTCAGAGAAAT | RESULTS IN | ATCCTTCCAGTCAG |
| SNRNA BOX | CTGAACTTGCTGGATTTTT | RETENTION | GGCCATGTTTGAGA |
| | GGAGCAGGGAGATGGAAT | OF RNA IN | GCTAGAAATAGCAA |
| | AGGAGCTTGCTCCGTCCA | NUCLEUS | GTTTAAATAAGGCT |
| | CTCCACGCATCGACCTGG | AND | AGTCCGTTATCAAC |
| | TATTGCAGTACCTCCAGG | TRANSCRIPT | TTGAAAAAGTGGG |
| | AACGGTGCACCCACTTTC | TERMINATION | ACCGAGTCGGTCCA |
| | TGGAGTTTCAAAAGTAGA | | CCTGAACCGTATATC |
| | CTGTACGCTAAGGGTCATA | | TTTAAGACGCCAA |
| | TCTTTTTTTGTTTGGTTTG | | CCAAGACACAAAC |
| | TGTCTTGGTTGGCGTCTTA | | CAAACAAAAAAAG |
| | AA (SEQ ID NO: 351) | | ATATGACCCTTAG |
| | | | CGTACAGTCTACT |
| | | | TTTGAAACTCCAG |
| | | | AAAGTGGGTGCAC |
| | | | CGTTCCTGGAGGT |
| | | | ACTGCAATACCAG |
| | | | GTCGATGCGTGGA |
| | | | GTGGACGGAGCA |
| | | | AGCTCCTATTCCA |
| | | | TCTCCCTGCTCCA |
| | | | AAAATCCAGCAAG |
| | | | TTCAGATTTCTCT |
| | | | GAACTTGCTGCTA |
| | | | TGGCCCTGACTGGA |
| | | | A |
| | | | (SEQ ID NO: 352) |
| U1 SNRNA 3′ | GTTTCAAAAGTAGACTGT | RESULTS IN | ATCCTTCCAGTCAG |
| BOX | ACGCTAAGGGTCATATCTT | RETENTION | GGCCATGTTTGAGA |
| | TTTTTGTTTGGTTTGTGTC | OF RNA IN | GCTAGAAATAGCAA |
| | TTGGTTGGCGTCTTAAA | NUCLEUS | GTTTAAATAAGGCT |
| | (SEQ ID NO: 353) | AND | AGTCCGTTATCAAC |
| | | TRANSCRIPT | TTGAAAAAGTGGG |
| | | TERMINATION | ACCGAGTCGGTCCA |
| | | | CCTGAACCGTATATC |
| | | | TTTAAGACGCCAA |
| | | | CCAAGACACAAAC |
| | | | CAAACAAAAAAAG |
| | | | ATATGACCCTTAG |
| | | | CGTACAGTCTACT |
| | | | TTTGAAACCTATGG |
| | | | CCCTGACTGGAA |
| | | | (SEQ ID NO: 354) |
| TRNA-LYSINE | GCCCGGCTAGCTCAGTCG | REPORTED | ATCCTTCCAGTCAG |
| | GTAGAGCATGAGACTCTT | TO ENABLE | GGCCATGTTTGAGA |
| | AATCTCAGGGTCGTGGGT | TRANSPORT | GCTAGAAATAGCAA |
| | TCGAGCCCCACGTTGGGC | OF RNA TO | GTTTAAATAAGGCT |
| | G (SEQ ID NO: 355) | MITOCHONDRIA | AGTCCGTTATCAAC |
| | | | TTGAAAAAGTGGG |
| | | | ACCGAGTCGGTCCA |
| | | | CCTGAACCGTATATC |
| | | | CGCCCAACGTGG |
| | | | GGCTCGAACCCAC |
| | | | GACCCTGAGATTA |
| | | | AGAGTCTCATGCT |
| | | | CTACCGACTGAGC |
| | | | TAGCCGGGCCTAT |
| | | | GGCCCTGACTGGAA |
| | | | (SEQ ID NO: 356) |
| BROCCOLI | GAGACGGTCGGGTCCAGA | VISUALIZATION | ATCCTTCCAGTCAG |
| APTAMER | TATTCGTATCTGTCGAGTA | (FLUORESCENCE) | GGCCATGTTTGAGA |
| | GAGTGTGGGCTC (SEQ ID | | GCTAGAAATAGCAA |
| | NO: 357) | | GTTTAAATAAGGCT |
| | | | AGTCCGTTATCAAC |
| | | | TTGAAAAAGTGGG |
| | | | ACCGAGTCGGTCCA |
| | | | CCTGAACCGTATATC |
| | | | GAGCCCACACTCT |
| | | | ACTCGACAGATAC |
| | | | GAATATCTGGACC |
| | | | CGACCGTCTCCTA |
| | | | TGGCCCTGACTGGA |
| | | | A |
| | | | (SEQ ID NO: 358) |
| SPINACH | GACGCAACTGAATGAAAT | VISUALIZATION | ATCCTTCCAGTCAG |
| APTAMER | GGTGAAGGACGGGTCCA | (FLUORESCENCE) | GGCCATGTTTGAGA |
| | GGTGTGGCTGCTTCGGCA | | GCTAGAAATAGCAA |
| | GTGCAGCTTGTTGAGTAG | | GTTTAAATAAGGCT |
| | AGTGTGAGCTCCGTAACT | | AGTCCGTTATCAAC |
| | AGTCGCGTC (SEQ ID NO: | | TTGAAAAAGTGGG |
| | 359) | | ACCGAGTCGGTCCA |
| | | | CCTGAACCGTATATC |
| | | | GACGCGACTAGTT |
| | | | ACGGAGCTCACAC |
| | | | TCTACTCAACAAG |
| | | | CTGCACTGCCGAA |
| | | | GCAGCCACACCTG |
| | | | GACCCGTCCTTCA |
| | | | CCATTTCATTCAG |
| | | | TTGCGTCCTATGGC |
| | | | CCTGACTGGAA |
| | | | (SEQ ID NO: 360) |
| SPINACH2 | GATGTAACTGAATGAAAT | VISUALIZATION | ATCCTTCCAGTCAG |
| APTAMER | GGTGAAGGACGGGTCCA | (FLUORESCENCE) | GGCCATGTTTGAGA |
| | GTAGGCTGCTTCGGCAGC | | GCTAGAAATAGCAA |
| | CTACTTGTTGAGTAGAGT | | GTTTAAATAAGGCT |
| | GTGAGCTCCGTAACTAGT | | AGTCCGTTATCAAC |
| | TACATC (SEQ ID NO: 361) | | TTGAAAAAGTGGG |
| | | | ACCGAGTCGGTCCA |
| | | | CCTGAACCGTATATC |
| | | | GATGTAACTAGTT |
| | | | ACGGAGCTCACAC |
| | | | TCTACTCAACAAG |
| | | | TAGGCTGCCGAAG |
| | | | CAGCCTACTGGAC |
| | | | CCGTCCTTCACCA |
| | | | TTTCATTCAGTTA |
| | | | CATCCTATGGCCCT |
| | | | GACTGGAA |
| | | | (SEQ ID NO: 362) |
| MANGO | GGCACGTACGAAGGGACG | VISUALIZATION | ATCCTTCCAGTCAG |
| APTAMER | GTGCGGAGAGGAGAGTAC | (FLUORESCENCE) | GGCCATGTTTGAGA |
| | GTGC (SEQ ID NO: 363) | | GCTAGAAATAGCAA |
| | | | GTTTAAATAAGGCT |
| | | | AGTCCGTTATCAAC |
| | | | TTGAAAAAGTGGG |
| | | | ACCGAGTCGGTCCA |
| | | | CCTGAACCGTATATC |
| | | | GCACGTACTCTCC |
| | | | TCTCCGCACCGTC |
| | | | CCTTCGTACGTGC |
| | | | CCTATGGCCCTGAC |
| | | | TGGAA |
| | | | (SEQ ID NO: 364) |
| HDV | GGCCGGCATGGTCCCAGC | 3′ END RNA | ATCCTTCCAGTCAG |
| RIBOZYME | CTCCTCGCTGGCGCCGGC | PROCESSING | GGCCATGTTTGAGA |
| | TGGGCAACATGCTTCGGC | | GCTAGAAATAGCAA |
| | ATGGCGAATGGGAC (SEQ | | GTTTAAATAAGGCT |
| | ID NO: 365) | | AGTCCGTTATCAAC |
| | | | TTGAAAAAGTGGG |
| | | | ACCGAGTCGGTCCA |
| | | | CCTGAACCGTATATC |
| | | | GTCCCATTCGCCA |
| | | | TGCCGAAGCATGT |
| | | | TGCCCAGCCGGC |
| | | | GCCAGCGAGGAG |
| | | | GCTGGGACCATGC |
| | | | CGGCCCTATGGCCC |
| | | | TGACTGGAA |
| | | | (SEQ ID NO: 366) |
| N⁶- | GGACTCTAGGACTGGACT | TARGET FOR | ATCCTTCCAGTCAG |
| METHYLADE | TTGGACT (SEQ ID NO: 367) | METHYLATION | GGCCATGTTTGAGA |
| NOSINE | | (UNDERLINED | GCTAGAAATAGCAA |
| MARKER | | A'S ARE | GTTTAAATAAGGCT |
| (M⁶ A) | | METHYLATED). | AGTCCGTTATCAAC |
| | | M6A | TTGAAAAAGTGGG |
| | | METHYLATION | ACCGAGTCGGTCCA |
| | | CAN | CCTGAACCGTATATC |
| | | RESULT IN | AGTCCAAAGTCCA |
| | | ENHANCED | GTCCTAGAGTCCC |
| | | RNA | TATGGCCCTGACTG |
| | | STABILITY | GAA |
| | | AND | (SEQ ID NO: 368) |
| | | EXPRESSION, | |
| | | BUT IS NOT | |
| | | YET FULLY | |
| | | UNDERSTOOD | |

*each PEgRNA is shown in the 5′ to 3′ direction and has the following structural elements of FIG. 3F as designated by font type, as follows: 5′ - spacer sequence (normal font) - gRNA core (underlined sequence) - homology arm (italicized) - RT template (bolded font) - primer binding site (italicized) - 3′.

[0769] The PEgRNAs of the above table are designed to site-specifically insert examples of the above motifs into the HEXA gene (defective in Tay-Sachs disease) (e.g., GenBank No. KR710351.1 (SEQ ID NO: 369), however, this is only for purposes of illustration. The use of prime editing in RNA tagging is not limited to the HEXA gene and indeed may be any. The HEXA mRNA has the following nucleotide sequence:

(SEQ ID NO: 369)
GTTCGTTGCAACAAATTGATGAGCAATGCTTTTTTATAATGCCAACTTTGT
ACAAAAAAGTTGGCATGACAAGTTCCAGGCTTTGGTTTTCGCTGCTGCTGG
CGGCAGCGTTCGCAGGACGGGCGACGGCCCTCTGGCCCTGGCCTCAGAACT
TCCAAACCTCCGACCAGCGCTACGTCCTTTACCCGAACAACTTTCAATTCC
AGTACGATGTCAGCTCGGCCGCGCAGCCCGGCTGCTCAGTCCTCGACGAGG
CCTTCCAGCGCTATCGTGACCTGCTTTTCGGTTCCGGGTCTTGGCCCCGTC
CTTACCTCACAGGGAAACGGCATACACTGGAGAAGAATGTGTTGGTTGTCT
CTGTAGTCACACCTGGATGTAACCAGCTTCCTACTTTGGAGTCAGTGGAGA
ATTATACCCTGACCATAAATGATGACCAGTGTTTACTCCTCTCTGAGACTG
TCTGGGGAGCTCTCCGAGGTCTGGAGACTTTTAGCCAGCTTGTTTGGAAAT
CTGCTGAGGGCACATTCTTTATCAACAAGACTGAGATTGAGGACTTTCCCC
GCTTTCCTCACCGGGGCTTGCTGTTGGATACATCTCGCCATTACCTGCCAC
TCTCTAGCATCCTGGACACTCTGGATGTCATGGCGTACAATAAATTGAACG
TGTTCCACTGGCATCTGGTAGATGATCCTTCCTTCCCATATGAGAGCTTCA
CTTTTCCAGAGCTCATGAGAAAGGGGTCCTACAACCCTGTCACCCACATCT
ACACAGCACAGGATGTGAAGGAGGTCATTGAATACGCACGGCTCCGGGGTA
TCCGTGTGCTTGCAGAGTTTGACACTCCTGGCCACACTTTGTCCTGGGGAC
CAGGTATCCCTGGATTACTGACTCCTTGCTACCCTGGGTCTGAGCCCTCTG
GCACCTTTGGACCAGTGAATCCCAGTCTCAATAATACCTATGAGTTCATGA
GCACATTCTTCTTAGAAGTCAGCTCTGTCTTCCCAGATTTTTATCTTCATC
TTGGAGGAGATGAGGTTGATTTCACCTGCTGGAAGTCCAACCCAGAGATCC
AGGACTTTATGAGGAAGAAAGGCTTCGGTGAGGACTTCAAGCAGCTGGAGT
CCTTCTACATCCAGACGCTGCTGGACATCGTCTCTTCTTATGGCAAGGGCT
ATGTGGTGTGGCAGGAGGTGTTTGATAATAAAGTAAAGATTCAGCCAGACA
CAATCATACAGGTGTGGCGAGAGGATATTCCAGTGAACTATATGAAGGAGC
TGGAACTGGTCACCAAGGCCGGCTTCCGGGCCCTTCTCTCTGCCCCCTGGT
ACCTGAACCGTATATCCTATGGCCCTGACTGGAAGGATTTCTACGTAGTGG
AACCCCTGGCATTTGAAGGTACCCCTGAGCAGAAGGCTCTGGTGATTGGTG
GAGAGGCTTGTATGTGGGGAGAATATGTGGACAACACAAACCTGGTCCCCA
GGCTCTGGCCCAGAGCAGGGGCTGTTGCCGAAAGGCTGTGGAGCAACAAGT
TGACATCTGACCTGACATTTGCCTATGAACGTTTGTCACACTTCCGCTGTG
AGTTGCTGAGGCGAGGTGTCCAGGCCCAACCCCTCAATGTAGGCTTCTGTG
AGCAGGAGTTTGAACAGACCTGCCCAACTTTCTTGTACAAAGTTGGCATTA
TAAGAAAGCATTGCTTATCAATTTGTTGCAACGAAC.

[0770] The corresponding HEXA protein has the following amino acid sequence:

(SEQ ID NO: 370)
MTSSRLWFSLLLAAAFAGRATALWPWPQNFQTSDQRYVLYPNNFQFQYDVS
SAAQPGCSVLDEAFQRYRDLLFGSGSWPRPYLTGKRHTLEKNVLVVSVVTP
GCNQLPTLESVENYTLTINDDQCLLLSETVWGALRGLETFSQLVWKSAEGT
FFINKTEIEDFPRFPHRGLLLDTSRHYLPLSSILDTLDVMAYNKLNVFHWH
LVDDPSFPYESFTFPELMRKGSYNPVTHIYTAQDVKEVIEYARLRGIRVLA
EFDTPGHTLSWGPGIPGLLTPCYPGSEPSGTFGPVNPSLNNTYEFMSTFFL
EVSSVFPDFYLHLGGDEVDFTCWKSNPEIQDFMRKKGFGEDFKQLESFYIQ
TLLDIVSSYGKGYVVWQEVFDNKVKIQPDTIIQVWREDIPVNYMKELELVT
KAGFRALLSAPWYLNRISYGPDWKDFYVVEPLAFEGTPEQKALVIGGEACM
WGEYVDNTNLVPRLWPRAGAVAERLWSNKLTSDLTFAYERLSHFRCELLRR
GVQAQPLNVGFCEQEFEQT.

[0771] Notably, the resulting RNA motifs would be included within the translated region of the HEXA gene, disrupting the function of the protein coding gene. Inserted polyadenylation motifs would result in premature transcript termination. This site is merely illustrative of the potential PEgRNAs that could result in insertion of the listed RNA motifs of the above table within a genomic site that is transcribed and thus which would produce an RNA product.

[0772] PEgRNAs for use with PE for RNA tagging could be expressed from a U6 promoter (in which case a single guanosine would be added to the 5′ end of the PEgRNA for guides that include protospacers that do not begin with a G and 6-7 thymine would be added to the 3′ end) or a pol II promoter such as pCMV (in which case it might be necessary to remove the intrinsically transcribed sequence of this promoter from the 5′ end of the RNA via a self-cleaving element or Csy4 motif, and a termination motif would need to be added to the 3′ end of the RNA that does not result in export of the RNA from the nucleus, such as the 3′ box motif listed above. Note that this motif would not be inserted into the genome as a result of PE, as it would be 3′ of the annealing region). The core PEgRNA scaffold is underlined, the homology and annealing regions are italicized, and the inserted sequence is bolded. Note that the sequence inserted is the reverse complement of the above examples—as described below and therefore these PEgRNAs would need to be targeted to the coding strand.

[0773] Also, note that self-cleaving ribozymes other than HDV need in some embodiments to be tailored to the given target site; that is, while HDV cleaves the encoded transcript immediately 5′ to itself, the cut sites for all other self-cleaving ribozymes are within the ribozyme itself. Therefore, the first and last roughly 5-10 nucleotides (and in some instances potentially more than 10) would actually be a part of the encoded sequence. As an example, to cleave the sequence 5′-NNNNNTCATCCTGATAAACTGCAAA-3′ (SEQ ID NO: 371) after the 5 Ns, where N is any nucleotide, using a hammerhead self-cleaving ribozyme, the following sequence would be inserted, where the underlined sequences form an imperfect RNA pairing element.

[0774] 5′NNNNNCAGTTTGTACGGATGACTGATGAGTCCCAAATAGGACGAAACGC GCTTCGGTGCGTCTCATCCTGATAAACTGCAAA-3′ (SEQ ID NO: 372).

[0775] There is significant flexibility in terms of the length and nature of this pairing element, and this would be true for any of the non-HDV self-cleaving ribozymes listed in the original submission. To install a hammerhead ribozyme to cleave the hexA mRNA using a PEgRNA with the same protospacer as the above listed constructs, the following PEgRNA sequence could be used (labels same as above):

(SEQ ID NO: 373)
5′ACCTGAACCGTATATCGACGCACCGAAGCGCGTTTCGTCCTATTTGGGA
CTCATCAGGATATACGGTTCAGGTGATATACGGTTCAGGTGACGCACCGAA
GCGCGTTTCGTCCTATTTGGGACTCATCAGACCTGAACCGTATATCATCCT
TCCAGTCAGGGCCATGTTTGAGAGCTAGAAATAGCAAGTTTAAATAAGGCT
AGTCCGTTATCAACTTGAAAAAGTGGGACCGAGTCGGTCCACCTGAACCGT
ATATCGACGCACCGAAGCGCGTTTCGTCCTATTTGGGACTCATCAGGATAT
ACGGTTCAGGTCTATGGCCCTGACTGGAA-3′
(wherein the core PEgRNA scaffold is underlined,
the homology and annealing regions are italicized,
and the inserted sequence is bolded).

[0776] Designing other PEgRNA for insertion of RNA motifs may follow the general principle described herein. However, it is noted that many of RNA motifs are potentially highly structured, which could make it difficult for them to be reverse-transcribed and inserted into the genome. Although for some RNA sequences, such as simple hairpins, both the RNA sequence itself and its complement are structured. However, that is unlikely to be true for the sequences noted above. Therefore, when inserting these motifs, it would most likely be best for the PEgRNA to encode the reverse complement of these sequences, resulting in the insertion of the DNA sequence actually encoding the motif into the genome. Similarly, inclusion of a self-cleaving ribozyme in the PEgRNA template region would result in processing and inefficient activity, while inclusion of its reverse complement would not. Thus, these PEgRNAs will likely have to target the coding strand, whereas PEgRNAs encoding other types of insertions (such as therapeutic correction) would be able to theoretically target either strand.

[0777] Also, note that for many of the inserted motifs, the resulting PEgRNA might not be able to be transcribed from the U6 promoter, necessitating use of other promoters, such as pCMV. Similarly, longer PEgRNAs could also be less stable. Shorter motifs, such as m⁶A markers, would not have this challenge.

[0778] G. Use of Prime Editing for Generation of Sophisticated Gene Libraries

[0779] Prime editing may also be used to generate sophisticated libraries of protein- or RNA-coding genes with defined or variable insertions, deletions, or defined amino acid/nucleotide conversions, and their use in high-throughput screening and directed evolution is described herein. This application of prime editing can be further described in Example 7.

[0780] The generation of variable genetic libraries has most commonly been accomplished through mutagenic PCR (see Cadwell R C and Joyce G F. PCR Methods Appl. 1992). This method relies on either using reaction conditions that reduce the fidelity of DNA polymerase, or using modified DNA polymerases with higher mutation rates. As such, biases in these polymerases are reflected in the library product (e.g. a preference for transition mutations versus transversions). An inherent limitation of this approach to library construction is a relative inability to affect the size of the gene being varied. Most DNA polymerases have extremely low rates of indel mutations (insertions or deletions), and most of these will result in frameshift mutations in protein-coding regions, rendering members of the library unlikely to pass any downstream selection (See McInerney P, Adams P, and Hadi M Z. Mol Biol Int. 2014).

[0781] Additionally, biases in PCR and cloning can make it difficult to generate single libraries consisting of genes of different sizes. These limitations can severely limit the efficacy of directed evolution to enhance existing or engineer novel protein functions. In natural evolution, large changes in protein function or efficacy are typically associated with insertion and deletion mutations that are unlikely to occur during canonical library generation for mutagenesis. Furthermore, these mutations most commonly occur in regions of the protein in question that are predicted to form loops, as opposed to the hydrophobic core. Thus, most indels generated using a traditional unbiased approach are likely to either be deleterious or ineffective.

[0782] Libraries that could bias such mutations to the sites within the protein where they would be most likely to be beneficial, e.g., loop regions, would have a significant advantage over traditional libraries given that all libraries access only a fraction of the possible mutation space. Finally, although it is possible to generate genetic libraries with site-specific indel mutations through multistep PCR and clonal assembly using NNK primers or via DNA shuffling, these libraries cannot undergo additional rounds of ‘indelgenesis’ in continual evolution. Continuous evolution is a type of directed evolution with minimal user intervention. One such example is PACE (see Esvelt K M, Carlson J C, and Liu D R. Nature. 2011). Because continuous evolution occurs with minimal user intervention, any increase in library diversity during the evolution must occur using the native replication machinery. As such, although libraries of genes with inserted or removed codons as specific loci can be generated and screened in PACE, additional rounds of ‘indelgenesis’ are not possible.

[0783] It is envisioned that the programmability of prime editing (PE) can be leveraged to generate highly sophisticated, programmed genetic libraries for use in high-throughput screening and directed evolution (see FIG. 29A). PE can insert, change or remove defined numbers of nucleotides from specified genetic loci using information encoded in a prime editing guide RNA (PEgRNA) (see FIG. 29B). This enables the generation of targeted libraries with one or more amino acids inserted or removed from the loop regions wherein mutations are most likely to give rise to changes in function, without background introduction of nonfunctional frameshift mutations (see FIG. 29C). PE can be used to install specific sets of mutations without regard for biases inherent in either DNA polymerase or the sequence being mutated.

[0784] For instance, while converting a CCC codon to a stop codon would be an unlikely occurrence via canonical library generation because it would require three consecutive mutations, including two transversions, PE could be used to convert any given, targeted codon to a TGA stop codon in one step. They could also be used to install programmed diversity at given positions, for instance by incorporating codons encoding any hydrophobic amino acid at a given site, while not encoding any others. Furthermore, because of the programmability of PE, multiple PEgRNAs could be utilized to generate multiple different edits at multiple sites simultaneously, enabling the generation of highly programmed libraries (see FIG. 29D). Additionally, it is possible to use reverse transcriptases with lower fidelity to generate regions of mutagenesis within an otherwise invariable library (such as the HIV-I reverse transcriptase or Bordetella phage reverse transcriptase) (see Naorem S S, Hin J, Wang S, Lee W R, Heng X, Miller J F, Guo H. Proc Natl Acad Sci 2017 and Martinez M A, Vartanian J P, Wain-Hobson S. Proc Natl Acad Sci USA 1994).

[0785] The possibility of iterative rounds of PE on the same site is also envisioned, allowing—for instance—the repeated insertion of codons at a single site, e.g., in a loop region. Also, it is envisioned that all of the above described approaches can be incorporated into continual evolution, enabling the generation of novel in situ evolving libraries (see FIG. 30). They could also be used to construct these libraries within other cell types where it would otherwise be difficult to assemble large libraries, for instance within mammalian cells. Generation of PE-encoding bacterial strains that have been optimized for directed evolution would be a useful additional tool for the identification of proteins and RNAs with improved or novel functionality. All of these uses of PE are non-obvious due to the novel nature of PEs. In conclusion, library generation via PE would be a highly useful tool in synthetic biology and directed evolution, as well as for high-throughput screening of protein and RNA combinatorial mutants.

### Competing Approaches

[0786] The chief method by which diverse libraries are currently generated is by mutagenic PCR (see Cadwell R C and Joyce G F. PCR Methods Appl. 1992), described above. Insertions or deletions can be introduced via degenerated NNK primers at defined sites during PCR, although introducing such mutations at multiple sites requires multiple rounds of iterative PCR and cloning before constructing a more diverse library via mutagenic PCR, rendering the method slow. An alternative, complementary method is DNA shuffling, where fragments of a library of genes generated via DNase treatment are introduced into a PCR reaction without primers, resulting in the annealing of different fragments to each other and the rapid generation of more diverse libraries than via mutagenic PCR alone (see Meyer A J, Ellefson J W, Ellington A D. Curr Protoc Mol Biol. 2014). Although this approach can theoretically generate indel mutations, it more often results in frameshift mutations that destroy gene function. Furthermore, DNA shuffling requires a high degree of homology between gene fragments.

[0787] Both of these methods must be done in vitro, with the resulting library transformed into cells, while libraries generated by PE can be constructed in situ, enabling their use in continual evolution. While libraries can be constructed in situ through in vivo mutagenesis, these libraries rely on the host cellular machinery and exhibit biases against indels. Similarly, although traditional cloning methods can be used to generate site-specific mutational profiles, they cannot be used in situ and are generally assembled one at a time in vitro before being transformed into cells. The efficiency and broad functionality of PE in both prokaryotic and eukaryotic cell types further suggests that these libraries could be constructed directly in the cell type of interest, as opposed to being cloned into a model organism such as E. coli and then transferred into the cell or organism of interest. Another competing approach for targeted diversification is automated multiplex genome engineering, or MAGE, wherein multiple single-stranded DNA oligonucleotides can be incorporated within replication forks and result in programmable mutations⁷. However, MAGE requires significant modification of the host strain and can lead to a 100-fold increase in off-target or background mutations (see Nyerges Á et al. Proc Natl Acad Sci USA. 2016), whereas PE is more highly programmed and anticipated to result in fewer off-target effects. Additionally, MAGE has not been demonstrated in a wide variety of cell types, including mammalian cells.

[0788] By contrast, prime editing is a novel and non-obvious complementary technique for library generation.

### Use of PE for Constructing Gene Libraries

[0789] PE may be used to construct gene libraries in a programmable manner.

[0790] In one example, PE can be used in a directed evolution experiment to introduce protein variants into gene libraries during a continual evolution experiment using PACE, permitting iterative accumulation of both point mutations and indels in a manner not possible via traditional approaches.

[0791] It has already been shown that PE can site-specifically and programmably insert nucleotides into a genetic sequence in E. coli. Directed evolution can be used to identify monobodies with improved binding to a specific epitope via a modified two-hybrid protein:protein binding PACE selection. Specific and highly variable loops within these monobodies contribute significantly to affinity and specificity. Improved monobody binding might be obtained rapidly in PACE by varying the length and composition of these loops in a targeted fashion. However, varying sequence length is not an established functionality of PACE. While library of varied loop sizes might be used as a starting point for PACE, no subsequent improvements to length would arise throughout the PACE selection, barring access to beneficial synergistic combinations of point mutations and indel mutations.

[0792] In various embodiments, PE can be used to improve the PACE selection by enabling the in situ generation and evolution of monobodies with varying loop lengths. To do so, the PACE E. coli strain may be introduced to an additional PE plasmid, which encodes the PE enzyme and one or more PEgRNAs. Expression of PE enzyme and PEgRNAs in the E. coli would be under the control of a small molecule delivered to the PACE lagoon at a rate selected by the experimenter.

[0793] In various embodiments, the PEgRNA components would contain a spacer directing the PE to the site of interest on the selection phage and would be designed such that a multiple of three nucleotides could be inserted at the target site such that a new PEgRNA binding site would be introduced, enabling the iterative insertion of one or more codons at the targeted site.

[0794] In parallel, another host E. coli strain might include PEgRNAs that would template the removal of one or more codons, enabling loop size to shrink during the evolution. A PACE experiment might utilize a mixture of both strains or alternate the two to permit the slow and controlled addition or removal of loop sequences.

[0795] In addition to the use of PE and PACE to create monobody libraries, this technique can also be applied to the evolution of antibodies using PE and PACE. The binding principles governing antibodies are very similar to those governing monobodies: the length of antibody complement-determining region loops is critical to their binding function. Further, longer loop lengths have been found to be critical in the development of rare antibodies with broadly protective activity against HIV-1 and other viral infections (see Mascola J R, Haynes B F. Immunol Rev. 2013). Application of PE as described above to an antibody or antibody-derived molecule would permit the generation of antibodies with diverse loop length and varied loop sequence. In combination with PACE, such an approach would permit enhanced binding through loop geometries not accessible to standard PACE, and thus permit evolution of highly functional antibodies.

[0796] As a non-limiting example, the following PEgRNAs could be used to programmably modify the genome of a bacteriophage used in a continuous evolution experiment:

| MODIFICATION | PEGRNA SEQUENCE |
|---|---|
| CCA | UACACCAUCACGGUCUAUGCGUUUUAGAGCUAGAAA |
| INSERTION | UAGCAAGUUAAAAUAAGGCUAGUCCGUUAUCAACUU |
| | GAAAAAGUGGCACCGAGUCGGUGCUAUCUUCGCCCC |
| | AUGCAUAGACCGUGAUGG (SEQ ID NO: 101) |
| 1 NT DELETION | CGCGUCGCGCUCGUCAGAUCGUUUUAGAGCUAGAAA |
| | UAGCAAGUUAAAAUAAGGCUAGUCCGUUAUCAACUU |
| | GAAAAAGUGGCACCGAGUCGGUGCUUUCCGCCUACC |
| | UGCAUCUGACGAGCGCGA (SEQ ID NO: 102) |
| POINT | AUCGGAGAAUACAUGAACAUGUUUUAGAGCUAGAAA |
| MUTATION | UAGCAAGUUAAAAUAAGGCUAGUCCGUUAUCAACUU |
| | GAAAAAGUGGCACCGAGUCGGUGCCGGAGAAUACAU |
| | GAACAUCGGACCCGCGCUAUCUUC (SEQ ID NO: |
| | 103) |
| NNN | UACACCAUCACGGUCUAUGCGUUUUAGAGCUAGAAA |
| INSERTION | UAGCAAGUUAAAAUAAGGCUAGUCCGUUAUCAACUU |
| (N = A/T/G/C) | GAAAAAGUGGCACCGAGUCGGUGCUAUCUUCGCCNN |
| | NUGCAUAGACCGUGAUGG (SEQ ID NO: 104) |
| ITERATIVE | UACACCAUCACGGUCUAUGCGUUUUAGAGCUAGAAA |
| GGG | UAGCAAGUUAAAAUAAGGCUAGUCCGUUAUCAACUU |
| INSERTION | GAAAAAGUGGCACCGAGUCGGUGCGGGGGGGGGGGG |
| | GUGCAUAGACCGUGAUGG (SEQ ID NO: 105) |

[0797] In various embodiments, the use of PE for constructing gene libraries may make the use of the mutagenic activity of error-prone reverse transcriptases. The use of such mutagenic reverse transcriptase may facilitate the generation of mutagenized programmable libraries due to the lower fidelity of the error-prone RTs. As used herein, the term “error-prone” reverse transcriptase refers to a reverse transcriptase enzyme that occurs naturally or which has been derived from another reverse transcriptase (e.g., a wild type M-MLV reverse transcriptase) which has an error rate that is less than the error rate of wild type M-MLV reverse transcriptase. The error rate of wild type M-MLV reverse transcriptase is reported to be in the range of one error in 15,000 to 27,000 nucleobase incorporations. See Boutabout et al. (2001) “DNA synthesis fidelity by the reverse transcriptase of the yeast retrotransposon Ty1,” Nucleic Acids Res 29(11):2217-2222, which is incorporated herein by reference.

[0798] Thus, for purposes of this application, the term “error prone” refers to those RT that have an error rate that is greater than one error in 15,000 nucleobase incorporation (6.7×10⁻⁵ or higher), e.g., 1 error in 14,000 nucleobases (7.14×10⁻⁵ or higher), 1 error in 13,000 nucleobases or fewer (7.7×10⁻⁵ or higher), 1 error in 12,000 nucleobases or fewer (7.7×10⁻⁵ or higher), 1 error in 11,000 nucleobases or fewer (9.1×10⁻⁵ or higher), 1 error in 10,000 nucleobases or fewer (1×10⁻⁴ or 0.0001 or higher), 1 error in 9,000 nucleobases or fewer (0.00011 or higher), 1 error in 8,000 nucleobases or fewer (0.00013 or higher) 1 error in 7,000 nucleobases or fewer (0.00014 or higher), 1 error in 6,000 nucleobases or fewer (0.00016 or higher), 1 error in 5,000 nucleobases or fewer (0.0002 or higher), 1 error in 4,000 nucleobases or fewer (0.00025 or higher), 1 error in 3,000 nucleobases or fewer (0.00033 or higher), 1 error in 2,000 nucleobase or fewer (0.00050 or higher), or 1 error in 1,000 nucleobases or fewer (0.001 or higher), or 1 error in 500 nucleobases or fewer (0.002 or higher), or 1 error in 250 nucleobases or fewer (0.004 or higher).

[0799] A variety of mutagenic RTs could be envisioned for generation of highly mutagenized programmable libraries. Two such examples are the mutagenic reverse transcriptases from Bordetella phage (see Handa, S., et al. Nucl Acids Res 9711-25 (2018), which is incorporated herein by reference) and Legionella pneumophila (see Arambula, D., et al. Proc Natl Acad Sci USA 8212-7 (2013), which is incorporated by reference). In the case of the RT from Bordetella phage (brt), an accessory protein might need to also be added (bavd) to Cas9—or delivered in trans—as well as additional RNA sequences to the PEgRNA to improve binding of the mutagenic RT to the target site (see Handa, S., et al. Nucl Acids Res 9711-25 (2018)). When using mutagenic RTs, the template region of the PEgRNA might be enriched in adenosines or AAY codons to enhance diversity.

[0800] The amino acid sequence of the mutagenic RT from Bordetella phage is provided as follows. Like other RTs disclosed herein, the Brt protein may be fused to a napDNAbp as a fusion protein to form a functional PE.

| Name | Sequence |
|---|---|
| brt | MGKRHRNLIDQITTWENLLDAYRKTSHGKRRTWGYLEF |
| mutagenic | KEYDLANLLALQAELKAGNYERGPYREFLVYEPKPRLI |
| rt | SALEFKDRLVQHALCNIVAPIFEAGLLPYTYACRPDKG |
| | THAGVCHVQAELRRTRATHFLKSDFSKFFPSIDRAALY |
| | AMIDKKIHCAATRRLLRVVLPDEGVGIPIGSLTSQLFA |
| | NVYGGAVDRLLHDELKQRHWARYMDDIVVLGDDPEELR |
| | AVFYRLRDFASERLGLKISHWQVAPVSRGINFLGYRIW |
| | PTHKLLRKSSVKRAKRKVANFIKHGEDESLQRFLASWS |
| | GHAQWADTHNLFTWMEEQYGIACH (SEQ ID NO: |
| | 129) |

[0801] In the case of Brt from Bordetella, the PE fusion may also include an additional accessory protein (Bavd). The accessory protein may be fused to the PE fusion protein or provided in trans. The amino acid sequence of Bavd accessory protein is provided as follows:

| Name | Sequence |
|---|---|
| bavd | MEPIEEATKCYDQMLIVERYERVISYLYPIAQSIPRKHGV |
| accessory | AREMFLKCLLGQVELFIVAGKSNQVSKLYAADAGLAMLRF |
| protein | WLRFLAGIQKPHAMTPHQVETAQVLIAEVGRILGS |
| to brt | WIARVNRKGQAGK (SEQ ID NO: 236) |

[0802] In the case of Brt from Bordetella, the PEgRNA may comprise an additional nucleotide sequence added a PEgRNA, e.g., to the 5′ or 3′ end. Exemplary sequence is as follows, which is originally from the Bordetella phage genome:

| NAME | SEQUENCE |
|---|---|
| PEGRNA- | ACCUUCUUGCAUGGCUCUGCCAACGCUACGGCUUGGCGGGC |
| ADDITION | UGGCCUUUCCUCAAUAGGUGGUCAGCCGGUUCUGUCCUGCU |
| 1 | UCGGCGAACACGUUACACGGUUCGGCAAAACGUCGAUUACU |
| | GAAAAUGGAAAGGCGGGGCCGACUUCAAGGGCAGGCUGGGA |
| | AAUAA (SEQ ID NO: 237) |

[0803] This PEgRNA addition sequence can be reduced in various ways to shorten the length. For example, the PEgRNA-addition 1 sequence could be reduced to the following exemplary alternative addition sequences:

| NAME | SEQUENCE |
|---|---|
| PEGRNA- | ACCUUCUUGCAUGGCUCUGCCAACGCUACGGCUUGGCGGG |
| ADDITION | CUGGCCUUUCCUCAAUAGGUGGUCAGCCGGUUCUGUCCUG |
| 2 | CUUCGGCGAACACGUUACACGGUUCGGCAAAACGUCGAUU |
| | ACUGAAAAUGGAAAGGCGGGGCCGACUUC (SEQ ID |
| | NO: 238) |
| PEGRNA- | ACCUUCUUGCAUGGCUCUGCCAACGCUACGGCUUGGCGGG |
| ADDITION | CUGGCCUUUCCUCAAUAGGUGGUCAAAGGGCAGGCUGGGA |
| 3 | AAUAA (SEQ ID NO: 239) |
| PEGRNA- | ACCUUCUUGCAUGGCUCUGCCAACGCUACGGCUUGGCGGG |
| ADDITION | CUGGCCUUUCCUCAAUAGGUGGUCA (SEQ ID NO: |
| 4 | 277) |
| PEGRNA- | CAUGGCUCUGCCAACGCUACGGCUUGGCGGGCUGGCCUUU |
| ADDITION | CCUCAAUAGGUGGUCAGCCGGUUCUGUCCUGCUUCGGCGA |
| 5 | ACACGUUACACGGUUCGGCAAAACGUCGAUUACUGAAAAU |
| | GGAAAGGCGGGGCCGACUUCAAGGGCAGGCUGGGAAAUAA |
| | (SEQ ID NO: 240) |
| PEGRNA- | CAUGGCUCUGCCAACGCUACGGCUUGGCGGGCUGGCCUUU |
| ADDITION | CCUCAAUAGGUGGUCAGCCGGUUCUGUCCUGCUUCGGCGA |
| 6 | ACACGUUACACGGUUCGGCAAAACGUCGAUUACUGAAAAU |
| | GGAAAGGCGGGGCCGACUUC (SEQ ID NO: 241) |
| PEGRNA- | CAUGGCUCUGCCAACGCUACGGCUUGGCGGGCUGGCCUUU |
| ADDITION | CCUCAAUAGGUGGUCAAAGGGCAGGCUGGGAAAUAA |
| 7 | (SEQ ID NO: 242) |
| PEGRNA- | CAUGGCUCUGCCAACGCUACGGCUUGGCGGGCUGGCCUUU |
| ADDITION | CCUCAAUAGGUGGUCA |
| 8 | (SEQ ID NO: 243) |

[0804] In other embodiments, the PEgRNA addition sequence can be also be mutated. For example, the PEgRNA-addition 1 sequence could be mutated to the following exemplary alternative addition sequence:

| NAME | SEQUENCE |
|---|---|
| PEGRNA- | ACCUUCUUGCAUGGCUCUGCCAACGCUACGGCUUGGCGGGC |
| ADDITION | UGGCCUUUCCUCAAUAGAUGAGCCGCCGGUUCUGUCCUGCU |
| 1 | UCGGCGAACACGUUACACGGUUCGGCAAAACGUCGAUUACU |
| MUTATED | GAAAAUGGAAAGGCGGGGCCGACUUCAAGGGCAGGCUGGGA |
| | AAUAA (SEQ ID NO: 244) |

[0805] In various embodiments relating to the use of PE for designing gene libraries, special PEgRNAs considerations may apply. For example, without wishing to be bound by theory, the additional PEgRNA sequences described above might be needed to enable efficient mutagenesis via mutagenic RTs. In another embodiment, iterative codon insertion using PE may required specific PEgRNA designs. For example, to insert a GGG (glycine) codon iteratively, the entire homology region of the PEgRNA might need to be composed of Gs, as shown above. This would mean that only certain sites could go iterative insertion. Additionally, the PAM sequence would not be able to be disrupted by the PE.

[0806] H. Use of Prime Editing for Insertion of Immunoepitopes

[0807] Prime editors may also be used as a means to insert known immunogenicity epitopes into endogenous or foreign genomic DNA, resulting in modification of the corresponding proteins for therapeutic or biotechnological applications (see FIGS. 31 and 32). Prior to the invention of prime editing, such insertions could be achieved only inefficiently and with high rates of indel formation from DSBs. prime editing solves the problem of high indel formation from insertion edits while generally offering higher efficiency than HDR. This lower rate of indel formation presents a major advantage of prime editing over HDR as a method for targeted DNA insertions, especially in the described application of inserting immunogenicity epitopes. The length of epitopes is in a range from few bases to hundreds of bases. Prime editor is an efficient approach to achieve such targeted insertions in mammalian cells.

[0808] The key concept of the invention is the use of prime editors to insert a nucleotide sequence containing previously described immunogenicity epitopes into endogenous or foreign genomic DNA for the downregulation and/or destruction of their protein products and/or expressing cell types. Nucleotide sequences for immunogenic epitope insertion would be targeted to genes in a manner to produce fusion proteins of the targeted gene's coded protein and the inserted immunogenic epitope's corresponding protein translation. Patient's immune systems will have been previously trained to recognize these epitopes as a result of standard prior immunization from routine vaccination against, for example, tetanus or diphtheria or measles. As a result of the immunogenic nature of the fused epitopes, patient's immune systems would be expected to recognize and disable the prime edited protein (not just the inserted epitope) and potentially the cells from which it was expressed.

[0809] Precise genome targeting technologies using the CRISPR/Cas system have recently been explored in a wide range of applications, including the insertion of engineered DNA sequences into targeted genomic loci. Previously, homology-directed repair (HDR) has been used for this application, requiring an ssDNA donor template and repair initiation by means of a double-stranded DNA break (DSB). This strategy offers the broadest range of possible changes to be made in cells and is the only method available to insert large DNA sequences into mammalian cells. However, HDR is hampered by undesired cellular side effects stemming from its initiating DSB, such as high levels of indel formation, DNA translocations, large deletions, and P53 activation. In addition to these drawbacks, HDR is limited by low efficiency in many cell types (T cells are a notable exception to this observation). Recent efforts to overcome these drawbacks include fusing human Rad51 mutants to a Cas9 D10A nickase (RDN), resulting in a DSB-free HDR system that features improved HDR product:indel ratios and lower off target editing, but is still hampered by cell-type dependencies and only modest HDR editing efficiency.

[0810] Recently developed fusions of Cas9 to reverse transcriptases (“Prime editors”) coupled with PEgRNAs represent a novel genome editing technology that offers a number of advantages over existing genome editing methods, including the ability to install any single nucleotide substitution, and to insert or delete any short stretch of nucleotides (up to at least several dozen bases) in a site-specific manner. Notably, PE edits are achieved with generally low rates of unintended indels. As such, PE enables targeted insertion-based editing applications that have been previously impossible or impractical.

[0811] This particular aspect describes a method for using prime editing as a means to insert known immunogenicity epitopes into endogenous or foreign genomic DNA, resulting in modification of the corresponding proteins for therapeutic or biotechnological applications (see FIGS. 31 and 32). Prior to the invention of prime editing, such insertions could be achieved only inefficiently and with high rates of indel formation from DSBs. prime editing solves the problem of high indel formation from insertion edits while generally offering higher efficiency than HDR. This lower rate of indel formation presents a major advantage of prime editing over HDR as a method for targeted DNA insertions, especially in the described application of inserting immunogenicity epitopes. The length of epitopes is in a range from few bases to hundreds of bases. Prime editor is the most efficient and cleanest technology to achieve such targeted insertions in mammalian cells.

[0812] The key concept of this aspect is the use of prime editors to insert a nucleotide sequence containing previously described immunogenicity epitopes into endogenous or foreign genomic DNA for the downregulation and/or destruction of their protein products and/or expressing cell types. Nucleotide sequences for immunogenic epitope insertion would be targeted to genes in a manner to produce fusion proteins of the targeted gene's coded protein and the inserted immunogenic epitope's corresponding protein translation. Patient's immune systems will have been previously trained to recognize these epitopes as a result of standard prior immunization from routine vaccination against, for example, tetanus or diphtheria or measles. As a result of the immunogenic nature of the fused epitopes, patient's immune systems would be expected to recognize and disable the prime edited protein (not just the inserted epitope) and potentially the cells from which it was expressed.

[0813] Fusions to targeted genes would be engineered as needed to ensure the inserted epitope protein translation is exposed for immune system recognition. This could include targeted nucleotide insertions resulting in protein translations yielding C-terminal fusions of immunogenicity epitopes to targeted genes, N-terminal fusions of immunogenicity epitopes to targeted genes, or the insertion of nucleotides into genes so that immunogenicity epitopes are coded within surfaced-exposed regions of protein structure.

[0814] Protein linkers encoded as nucleotides inserted between the target gene sequence and the inserted immunogenicity epitope nucleotide sequence may need to be engineered as part of this invention to facilitate immune system recognition, cellular trafficking, protein function, or protein folding of the targeted gene. These inserted nucleotide-encoded protein linkers may include (but are not limited to) variable lengths and sequences of the XTEN linker or variable lengths and sequences of Glycine-Serine linkers. These engineered linkers have been previous used to successfully facilitate protein fusions. Exemplary linkers may include any of those described herein, including the amino acid sequence (GGGGS)n (SEQ ID NO: 165), (G)n (SEQ ID NO: 166), (EAAAK)n (SEQ ID NO: 167), (GGS)n (SEQ ID NO: 168), (SGGS)n (SEQ ID NO: 169), (XP)n (SEQ ID NO: 170), or any combination thereof, wherein n is independently an integer between 1 and 30, and wherein X is any amino acid. In some embodiments, the linker comprises the amino acid sequence (GGS)n (SEQ ID NO: 176), wherein n is 1, 3, or 7. In some embodiments, the linker comprises the amino acid sequence SGSETPGTSESATPES (SEQ ID NO: 171). In some embodiments, the linker comprises the amino acid sequence SGGSSGGSSGSETPGTSESATPESSGGSSGGS (SEQ ID NO: 172). In some embodiments, the linker comprises the amino acid sequence SGGSGGSGGS (SEQ ID NO: 173). In some embodiments, the linker comprises the amino acid sequence SGGS (SEQ ID NO: 174).

[0815] Distinguishing features of this aspect include the ability to use previously acquired immune responses to specific amino acid sequences as a means to induce an immune response against otherwise non-immunogenic proteins. Another distinguishing feature is the ability to insert the nucleotide sequences of these immunogenic epitopes in a targets manner that does not induce high levels of unwanted indels as a by-product editing and is efficient in its insertion. This specific application of PE has the ability to combine cell type-specific delivery methods (such as AAV serotypes) to insert epitopes in cell types that are of interest to trigger an immune response to.

[0816] Prime editing as a means of inserting immunogenic epitopes into pathogenic genes could be used to program the patient's immune system to fight a wide variety of diseases (not limited to cancer as with immuno-oncology strategies). An immediately relevant use of this technology would be as a cancer therapeutic as it could undermine a tumor's immune escape mechanism by causing an immune response to a relevant oncogene like HER2 or growth factors like EGFR. Such an approach could seem similar to T-cell engineering, but one novel advance of this approach is that it can be utilized in many cell types and for diseases beyond cancer, without needed to generate and introduce engineered T-cells into patients.

[0817] Using PE to insert an immunogenicity epitope which most people are already vaccinated against (tetanus, pertussis, diphtheria, measles, mumps, rubella, etc.) into a foreign or endogenous gene that drives a disease, so the patient's immune system learns to disable that protein.

[0818] Diseases that stand to have a potential therapeutic benefit from the aforementioned strategy include those caused by aggregation of toxic proteins, such as in fatal familial insomnia. Other diseases that could benefit include those caused by pathogenic overexpression of an otherwise nontoxic endogenous protein, and those caused by foreign pathogens.

[0819] Primary therapeutic indications include those mentioned above such as therapeutics for cancer, prion and other neurodegenerative diseases, infectious diseases, and preventative medicine. Secondary therapeutic indications may include preventative care for patients with late-onset genetic diseases. It is expected that current standard of care medicines may be used in conjunction with prime editing for some diseases, like particularly aggressive cancers, or in cases where medications help alleviate disease symptoms until the disease completely cured. Below are examples of immunoepitopes that may be inserted into genes by the herein disclosed prime editors:

| | | EPITOPE AMINO | EXAMPLE NUCLEIC ACID |
|---|---|---|---|
| VACCINE | DISEASE | ACID SEQUENCE | SEQUENCE (8) |
| 1 | TETANUS | QYIKANSKFIGITE | CATGATATAAAAGCAAATTCTAAATTTA |
| | TOXOID | L (SEQ ID NO: 396) | TAGGTATAACTGAACTA (SEQ ID NO: |
| | | | 397) |
| 2 | DIPHTHERIA | GADDVVDSSKSF | GGCGCCGACGACGTGGTGGACAGCAG |
| | TOXIN | VMENFSSYHGTK | CAAGAGCTTCGTGATGGAGAACTTCA |
| | MUTANT | PGYVDSIQKGIQK | GCAGCTACCACGGCACCAAGCCCGGC |
| | CRM197 | PKSGTQGNYDDD | TACGTGGACAGCATCCAGAAGGGCAT |
| | | WKEFYSTDNKYD | CCAGAAGCCCAAGAGCGGCACCCAGG |
| | | AAGYSVDNENPL | GCAACTACGACGACGACTGGAAGGAG |
| | | SGKAGGVVKVTY | TTCTACAGCACCGACAACAAGTACGA |
| | | PGLTKVLALKVD | CGCCGCCGGCTACAGCGTGGACAACG |
| | | NAETIKKELGLSL | AGAACCCCCTGAGCGGCAAGGCCGGC |
| | | TEPLMEQVGTEEF | GGCGTGGTGAAGGTGACCTACCCCGG |
| | | IKRFGDGASRVVL | CCTGACCAAGGTGCTGGCCCTGAAGG |
| | | SLPFAEGSSSVEYI | TGGACAACGCCGAGACCATCAAGAAG |
| | | NNWEQAKALSVE | GAGCTGGGCCTGAGCCTGACCGAGCC |
| | | LEINFETRGKRGQ | CCTGATGGAGCAGGTGGGCACCGAGG |
| | | DAMYEYMAQAC | AGTTCATCAAGAGGTTCGGCGACGGC |
| | | AGNRVRRSVGSSL | GCCAGCAGGGTGGTGCTGAGCCTGCC |
| | | SCINLDWDVIRDK | CTTCGCCGAGGGCAGCAGCAGCGTGG |
| | | TKTKIESLKEHGPI | AGTACATCAACAACTGGGAGCAGGCC |
| | | KNKMSESPNKTV | AAGGCCCTGAGCGTGGAGCTGGAGAT |
| | | SEEKAKQYLEEFH | CAACTTCGAGACCAGGGGCAAGAGGG |
| | | QTALEHPELSELK | GCCAGGACGCCATGTACGAGTACATGG |
| | | TVTGTNPVFAGA | CCCAGGCCTGCGCCGGCAACAGGGTG |
| | | NYAAWAVNVAQV | AGGAGGAGCGTGGGCAGCAGCCTGAG |
| | | IDSETADNLEKTT | CTGCATCAACCTGGACTGGGACGTGAT |
| | | AALSILPGIGSVM | CAGGGACAAGACCAAGACCAAGATCG |
| | | GIADGAVHHNTEE | AGAGCCTGAAGGAGCACGGCCCCATC |
| | | IVAQSIALSSLMVA | AAGAACAAGATGAGCGAGAGCCCCAA |
| | | QAIPLVGELVDIGF | CAAGACCGTGAGCGAGGAGAAGGCC |
| | | AAYNFVESIINLFQ | AAGCAGTACCTGGAGGAGTTCCACCA |
| | | VVHNSYNRPAYSP | GACCGCCCTGGAGCACCCCGAGCTGA |
| | | GHKTQPFLHDGY | GCGAGCTGAAGACCGTGACCGGCACC |
| | | AVSWNTVEDSIIR | AACCCCGTGTTCGCCGGCGCCAACTA |
| | | TGFQGESGHDIKI | CGCCGCCTGGGCCGTGAACGTGGCCC |
| | | TAENTPLPIAGVL | AGGTGATCGACAGCGAGACCGCCGAC |
| | | LPTIPGKLDVNKS | AACCTGGAGAAGACCACCGCCGCCCT |
| | | KTHISVNGRKIRM | GAGCATCCTGCCCGGCATCGGCAGCGT |
| | | RCRAIDGDVTFCR | GATGGGCATCGCCGACGGCGCCGTGC |
| | | PKSPVYVGNGVH | ACCACAACACCGAGGAGATCGTGGCC |
| | | ANLHVAFHRSSSE | CAGAGCATCGCCCTGAGCAGCCTGAT |
| | | KIHSNEISSDSIGV | GGTGGCCCAGGCCATCCCCCTGGTGG |
| | | LGYQKTVDHTKV | GCGAGCTGGTGGACATCGGCTTCGCC |
| | | NSKLSLFFEIKS | GCCTACAACTTCGTGGAGAGCATCATC |
| | | (SEQ ID NO: 398) | AACCTGTTCCAGGTGGTGCACAACAG |
| | | | CTACAACAGGCCCGCCTACAGCCCCG |
| | | | GCCACAAGACCCAGCCCTTCCTGCAC |
| | | | GACGGCTACGCCGTGAGCTGGAACAC |
| | | | CGTGGAGGACAGCATCATCAGGACCG |
| | | | GCTTCCAGGGCGAGAGCGGCCACGAC |
| | | | ATCAAGATCACCGCCGAGAACACCCC |
| | | | CCTGCCCATCGCCGGCGTGCTGCTGCC |
| | | | CACCATCCCCGGCAAGCTGGACGTGA |
| | | | ACAAGAGCAAGACCCACATCAGCGTG |
| | | | AACGGCAGGAAGATCAGGATGAGGTG |
| | | | CAGGGCCATCGACGGCGACGTGACCT |
| | | | TCTGCAGGCCCAAGAGCCCCGTGTAC |
| | | | GTGGGCAACGGCGTGCACGCCAACCT |
| | | | GCACGTGGCCTTCCACAGGAGCAGCA |
| | | | GCGAGAAGATCCACAGCAACGAGATC |
| | | | AGCAGCGACAGCATCGGCGTGCTGGG |
| | | | CTACCAGAAGACCGTGGACCACACCA |
| | | | AGGTGAACAGCAAGCTGAGCCTGTTC |
| | | | TTCGAGATCAAGAGC (SEQ ID NO: 399) |
| 3 | MUMPS | GTYRLIPNARANL | GGCACCTACAGGCTGATCCCCAACGC |
| | IMMUNOE | TA (SEQ ID NO: | CAGGGCCAACCTGACCGCC (SEQ ID |
| | PITOPE 1 | 400) | NO: 401) |
| 4 | MUMPS | PSKFFTISDSATFA | CCGAGCAAATTTTTTACCATTAGCGAT |
| | IMMUNOE | PGPVSNA (SEQ ID | AGCGCGACCTTTGCGCCGGGCCCGGT |
| | PITOPE 2 | NO: 402) | GAGCAACGCG (SEQ ID NO: 403) |
| | MUMPS | PSKLFIMLDNATF | CCGAGCAAACTGTTTATTATGCTGGAT |
| | IMMUNOE | APGPVVNA (SEQ | AACGCGACCTTTGCGCCGGGCCCGGT |
| | PITOPE 1 | ID NO: 404) | GGTGAACGCG (SEQ ID NO: 405) |
| | | | SELECTED EXAMPLES FROM |
| | | | HEMAGGLUTININ-NEURAMINIDASE |
| | | | (HN) DIVERSITY AMONG OUTBREAK |
| | | | STRAINS (TABLE 1) DIVERGENCE |
| | | | BETWEEN VACCINE STRAIN JL5 AND |
| | | | OUTBREAK STRAINS (TABLE 2) |
| 5 | RUBELLA | TPPPYQVSCGGES | ACCCCCCCCCCCTACCAGGTGAGCTGC |
| | VIRUS | DRASARVIDPAAQ | GGCGGCGAGAGCGACAGGGCCAGCG |
| | (RV) | S (SEQ ID NO: 406) | CCAGGGTGATCGACCCCGCCGCCCAG |
| | | | AGC (SEQ ID NO: 407) |
| 6 | HEMAGGLUTININ | PEYAYKIVKNKK | CCCGAGTACGCCTACAAGATCGTGAA |
| | | MEDGFLQGMVD | GAACAAGAAGATGGAGGACGGCTTCC |
| | | GWYGHHSNEQGS | TGCAGGGCATGGTGGACGGCTGGTAC |
| | | GLMENERTLDKA | GGCCACCACAGCAACGAGCAGGGCAG |
| | | NPNNDLCSWSDH | CGGCCTGATGGAGAACGAGAGGACCC |
| | | EASSNNTNQEDLL | TGGACAAGGCCAACCCCAACAACGAC |
| | | QRESRRKKRIGTS | CTGTGCAGCTGGAGCGACCACGAGGC |
| | | TLNQRGNCNTKC | CAGCAGCAACAACACCAACCAGGAGG |
| | | QTEEARLKREEVS | ACCTGCTGCAGAGGGAGAGCAGGAGG |
| | | LVKSDQCSNGSLQ | AAGAAGAGGATCGGCACCAGCACCCT |
| | | CRANNSTEQVD | GAACCAGAGGGGCAACTGCAACACCA |
| | | (SEQ ID NO: 408) | AGTGCCAGACCGAGGAGGCCAGGCTG |
| | | | AAGAGGGAGGAGGTGAGCCTGGTGA |
| | | | AGAGCGACCAGTGCAGCAACGGCAGC |
| | | | CTGCAGTGCAGGGCCAACAACAGCAC |
| | | | CGAGCAGGTGGAC (SEQ ID NO: 409) |
| 7 | NEURAMI | TKSTNSRSGGISG | ACCAAGAGCACCAACAGCAGGAGCG |
| | NIDASE | PDNEAPVGEAPSP | GCGGCATCAGCGGCCCCGACAACGAG |
| | | YGDNPRPNDGNN | GCCCCCGTGGGCGAGGCCCCCAGCCC |
| | | IRIGSKGYNGIITD | CTACGGCGACAACCCCAGGCCCAACG |
| | | TIEESCSCYPDAK | ACGGCAACAACATCAGGATCGGCAGC |
| | | VVKSVELDSTIWT | AAGGGCTACAACGGCATCATCACCGA |
| | | SGSSPNQKIITIGW | CACCATCGAGGAGAGCTGCAGCTGCT |
| | | DPNGWTGTPMSP | ACCCCGACGCCAAGGTGGTGAAGAGC |
| | | NGAYGTDGPSNG | GTGGAGCTGGACAGCACCATCTGGAC |
| | | QANQHQAESISA | CAGCGGCAGCAGCCCCAACCAGAAGA |
| | | GNSSLCPIRDNWH | TCATCACCATCGGCTGGGACCCCAACG |
| | | GSNRSWSWPDGA | GCTGGACCGGCACCCCCATGAGCCCC |
| | | E (SEQ ID NO: 410) | AACGGCGCCTACGGCACCGACGGCCC |
| | | | CAGCAACGGCCAGGCCAACCAGCACC |
| | | | AGGCCGAGAGCATCAGCGCCGGCAAC |
| | | | AGCAGCCTGTGCCCCATCAGGGACAA |
| | | | CTGGCACGGCAGCAACAGGAGCTGGA |
| | | | GCTGGCCCGACGGCGCCGAG (SEQ ID |
| | | | NO: 411) |
| 8 | TAP1 | EKIVLLLAMMEKI | GAGAAGATCGTGCTGCTGCTGGCCATG |
| | (TRANSPORT | VLLLAKCQTPMG | ATGGAGAAGATCGTGCTGCTGCTGGCC |
| | ANTIGEN | AIKAVDGVTNKCP | AAGTGCCAGACCCCCATGGGCGCCAT |
| | PRESENTATION) | YLGSPSF (SEQ ID | CAAGGCCGTGGACGGCGTGACCAACA |
| | ON | NO: 412) | AGTGCCCCTACCTGGGCAGCCCCAGC |
| | H5N1 | | TTC (SEQ ID NO: 413) |
| | VIRUS | | |
| | HEMAGGLUTININ | | |
| 9 | TAP2 | IRPCFWVELNPNQ | ATCAGGCCCTGCTTCTGGGTGGAGCTG |
| | (TRANSPORT | KIITIRPCFWVELI | AACCCCAACCAGAAGATCATCACCATC |
| | ANTIGEN | CYPDAGEIT(SEQ | AGGCCCTGCTTCTGGGTGGAGCTGATC |
| | PRESENTATION) | ID NO: 414) | TGCTACCCCGACGCCGGCGAGATCAC |
| | ON | | C (SEQ ID NO: 415) |
| | H5N1 | | |
| | VIRUS | | |
| | NEURAMINIDASE | | |
| 10 | HEMAGGLUTININ | MEKIVLLLAEKIV | ATGGAGAAGATCGTGCTGCTGCTGGCC |
| | EPITOPES | LLLAMCPYLGSPS | GAGAAGATCGTGCTGCTGCTGGCCATG |
| | TOWARD | FKCQTPMGAIKAV | TGCCCCTACCTGGGCAGCCCCAGCTTC |
| | CLASS I | DGVTNK (SEQ ID | AAGTGCCAGACCCCCATGGGCGCCAT |
| | HLA | NO: 416) | CAAGGCCGTGGACGGCGTGACCAACA |
| | | | AG (SEQ ID NO: 417) |
| 11 | NEURAMINIDASE | NPNQKIITICYPDAG | AACCCCAACCAGAAGATCATCACCATCT |
| | | EITIRPCFWVELRPC | GCTACCCCGACGCCGGCGAGATCACCAT |
| | EPITOPES | FWVELI (SEQ ID | CAGGCCCTGCTTCTGGGTGGAGCTGAG |
| | TOWARD | NO: 418) | GCCCTGCTTCTGGGTGGAGCTGATC |
| | CLASS I | | (SEQ ID NO: 419) |
| | HLA | | |
| 12 | HEMAGGLUTININ | MVSLVKSDQIGTST | ATGGTGAGCCTGGTGAAGAGCGACCAG |
| | EPITOPES | LNQR (SEQ ID NO: | ATCGGCACCAGCACCCTGAACCAGAGG |
| | TOWARD | 420) | (SEQ ID NO: 421) |
| | CLASS II | | |
| | HLA | | |
| 13 | NEURAMINIDASE | YNGIITDTI (SEQ ID | TACAACGGCATCATCACCGACACCATC |
| | | NO: 422) | (SEQ ID NO: 423) |
| | EPITOPES | | |
| | TOWARD | | |
| | CLASS II | | |
| | HLA | | |
| 14 | HEMAGGLUTININ | MEKIVLLLAEKIVL | ATGGAGAAGATCGTGCTGCTGCTGGCC |
| | EPITOPE | LLAMMVSLVKSDQ | GAGAAGATCGTGCTGCTGCTGGCCATG |
| | H5N1- | CPYLGSPSFIGTSTL | ATGGTGAGCCTGGTGAAGAGCGACCAG |
| | BOUND | NQRKCQTPMGAIK | TGCCCCTACCTGGGCAGCCCCAGCTTCA |
| | CLASS I | AVDGVTNK(SEQ | TCGGCACCAGCACCCTGAACCAGAGG |
| | AND | ID NO: 424) | (SEQ ID NO: 425) |
| | CLASS II | | |
| | HLA | | |
| 15 | NEURAMINIDASE | NPNQKIITIYNGIIT | AACCCCAACCAGAAGATCATCACCATCT |
| | EPITOPE | DTICYPDAGEITIRP | ACAACGGCATCATCACCGACACCATCTG |
| | H5N1- | CFWVELRPCFWVE | CTACCCCGACGCCGGCGAGATCACCATC |
| | BOUND | LI (SEQ ID NO: 426) | AGGCCCTGCTTCTGGGTGGAGCTGAGG |
| | CLASS I | | CCCTGCTTCTGGGTGGAGCTGATC (SEQ |
| | AND | | ID NO: 427) |
| | CLASS II | | |
| | HLA | | |

[0820] Additional immunoepitopes may also be installed which are known in the art. Any of the immunoepitopes available from the Immune Epitope Database and Analysis Resource (iedb.org/epitopedetails_v3.php) (the contents of which are incorporated herein by reference) may be installed by the prime editors disclosed herein.

[0821] In some embodiments, the immunoepitopes which may be installed by the prime editors disclosed herein may include any of the following epitopes:

| | | | SEQ ID | ACCESS. |
|---|---|---|---|---|
| NO. | DISEASE | EPITOPE AMINO ACID SEQUENCE | NO | NO. |
| 1 | TETANUS | QYIKANSKFIGITEL | 396 | NA |
| | TOXOID | | | |
| 2 | DIPHTHERIA | GADDVVDSSKSFVMENFSSYHGTKP | 428 | NA |
| | TOXIN MUTANT | GYVDSIQKGIQKPKSGTQGNYDDDW | | |
| | CRM197 | KEFYSTDNKYDAAGYSVDNENPLSG | | |
| | | KAGGVVKVTYPGLTKVLALKVDNA | | |
| | | ETIKKELGLSLTEPLMEQVGTEEFIKR | | |
| | | FGDGASRVVLSLPFAEGSSSVEYINN | | |
| | | WEQAKALSVELEINFETRGKRGQDA | | |
| | | MYEYMAQACAGNRVRRSVGSSLSCI | | |
| | | NLDWDVIRDKTKTKIESLKEHGPIKN | | |
| | | KMSESPNKTVSEEKAKQYLEEFHQT | | |
| | | ALEHPELSELKTVTGTNPVFAGANYA | | |
| | | AWAVNVAQVIDSETADNLEKTTAALS | | |
| | | ILPGIGSVMGIADGAVHHNTEEIVAQS | | |
| | | IALSSLMVAQAIPLVGELVDIGFAAYN | | |
| | | FVESIINLFQVVHNSYNRPAYSPGHKT | | |
| | | QPFLHDGYAVSWNTVEDSIIRTGFQG | | |
| | | ESGHDIKITAENTPLPIAGVLLPTIPGK | | |
| | | LDVNKSKTHISVNGRKIRMRCRAIDG | | |
| | | DVTFCRPKSPVYVGNGVHANLHVAF | | |
| | | HRSSSEKIHSNEISSDSIGVLGYQKTV | | |
| | | DHTKVNSKLSLFFEIKS | | |
| 3 | MUMPS | GTYRLIPNARANLTA | 400 | NA |
| 4 | MUMPS | PSKFFTISDSATFAPGPVSNA; | 402; 404 | NA |
| | | PSKLFIMLDNATFAPGPVVNA | | |
| 5 | RUBELLA VIRUS | TPPPYQVSCGGESDRASARVIDPAAQ | 406 | NA |
| | (RV) | S | | |
| 6 | HEMAGGLUTININ | PEYAYKIVKNKKMEDGFLQGMVDG | 408 | NA |
| | | WYGHHSNEQGSGLMENERTLDKAN | | |
| | | PNNDLCSWSDHEASSNNTNQEDLLQ | | |
| | | RESRRKKRIGTSTLNQRGNCNTKCQT | | |
| | | EEARLKREEVSLVKSDQCSNGSLQCR | | |
| | | ANNSTEQVD | | |
| 7 | NEURAMINIDASE | TKSTNSRSGGISGPDNEAPVGEAPSP | 410 | NA |
| | | YGDNPRPNDGNNIRIGSKGYNGIITD | | |
| | | TIEESCSCYPDAKVVKSVELDSTIWTS | | |
| | | GSSPNQKIITIGWDPNGWTGTPMSPN | | |
| | | GAYGTDGPSNGQANQHQAESISAGN | | |
| | | SSLCPIRDNWHGSNRSWSWPDGAE | | |
| 8 | TAP (TRANSPORT | EKIVLLLAMMEKIVLLLAKCQTPMG | 412 | NA |
| | ANTIGEN | AIKAVDGVTNKCPYLGSPSF | | |
| | PRESENTATION) | | | |
| | ON H5N1 VIRUS | | | |
| | HEMAGGLUTININ | | | |
| 9 | TAP (TRANSPORT | IRPCFWVELNPNQKIITIRPCFWVELIC | 414 | NA |
| | ANTIGEN | YPDAGEIT | | |
| | PRESENTATION) | | | |
| | ON H5N1 VIRUS | | | |
| | NEURAMINIDASE | | | |
| 10 | HEMAGGLUTININ | MEKIVLLLAEKIVLLLAMCPYLGSPS | 416 | NA |
| | EPITOPES | FKCQTPMGAIKAVDGVTNK | | |
| | TOWARD CLASS I | | | |
| | HLA | | | |
| 11 | NEURAMINIDASE | NPNQKIITICYPDAGEITIRPCFWVELR | 418 | NA |
| | EPITOPES | PCFWVELI | | |
| | TOWARD CLASS I | | | |
| | HLA | | | |
| 12 | HEMAGGLUTININ | MVSLVKSDQIGTSTLNQR | 420 | NA |
| | EPITOPES | | | |
| | TOWARD CLASS | | | |
| | II HLA | | | |
| 13 | NEURAMINIDASE | YNGIITDTI | 422 | NA |
| | EPITOPES | | | |
| | TOWARD CLASS | | | |
| | II HLA | | | |
| 14 | HEMAGGLUTININ | MEKIVLLLAEKIVLLLAMMVSLVKSD | 424 | NA |
| | EPITOPE H5N1- | QCPYLGSPSFIGTSTLNQRKCQTPMG | | |
| | BOUND CLASS I | AIKAVDGVTNK | | |
| | AND CLASS II | | | |
| | HLA | | | |
| 15 | NEURAMINIDASE | NPNQKIITIYNGIITDTICYPDAGEITIR | 426 | NA |
| | EPITOPE H5N1- | PCFWVELRPCFWVELI | | |
| | BOUND CLASS I | | | |
| | AND CLASS II | | | |
| | HLA | | | |
| 16 | CORYNEBACTERIUM | AACAGNRVRRSVGSSLKC | 899 | SRC280292 |
| | DIPHTHERIAE | | | |
| 17 | MEASLES VIRUS | AADHCPVVEVNGVTI | 900 | P69353.1 |
| | STRAIN | | | |
| | EDMONSTON | | | |
| 18 | MEASLES VIRUS | AAHLPTGTPLDID | 901 | P04851.1 |
| | STRAIN | | | |
| | EDMONSTON | | | |
| 19 | BORDETELLA | AALAVWAGLAVQ | 902 | Q00879.1 |
| | PERTUSSIS | | | |
| 20 | MEASLES VIRUS | AALGVATAAQITAGI | 903 | P69353.1 |
| | STRAIN | | | |
| | EDMONSTON | | | |
| 21 | RUBELLA VIRUS | AALLNTPPPYQVSCGGESDRATAR | 904 | P07566.1 |
| | STRAIN THERIEN | | | |
| 22 | RUBELLA VIRUS | AAQSFTGVVYGTHTT | 905 | BAA28178.1 |
| 23 | RUBELLA VIRUS | ACEVEPAFGHSDAAC | 906 | BAA28178.1 |
| 24 | RUBELLA VIRUS | ACTFWAVNAYSSGGY | 907 | BAA28178.1 |
| 25 | RUBELLA VIRUS | ADDPLLR | 908 | BAA19893.1 |
| 26 | RUBELLA VIRUS | ADDPLLRT | 909 | CAJ88851.1 |
| 27 | MEASLES VIRUS | AEMICDIDTYIVEAG | 910 | P04851.1 |
| | STRAIN | | | |
| | EDMONSTON | | | |
| 28 | MEASLES VIRUS | AEMICDIDTYIVEAGLASFI | 911 | P04851.1 |
| | STRAIN | | | |
| | EDMONSTON | | | |
| 29 | MEASLES VIRUS | AEPLLSC | 912 | P04851.1 |
| | STRAIN | | | |
| | EDMONSTON | | | |
| 30 | BORDETELLA | AFVSTSSSRRYTEVY | 913 | CAD44970.1 |
| | PERTUSSIS | | | |
| 31 | BORDETELLA | AGFIYRETFCITTIYKTGQPAADHYYS | 914 | P04979.1 |
| | PERTUSSIS | KVTA | | |
| 32 | RUBELLA VIRUS | AGLLACCAKCLYYLR | 915 | BAA28178.1 |
| 33 | RUBELLA VIRUS | AHTTSDPWHPPG | 916 | BAA19893.1 |
| 34 | MEASLES VIRUS | AIAKLEDAKELLESS | 917 | P69353.1 |
| | STRAIN | | | |
| | EDMONSTON | | | |
| 35 | MEASLES VIRUS | AIDNLRASLETTNQA | 918 | P69353.1 |
| | STRAIN | | | |
| | EDMONSTON | | | |
| 36 | BORDETELLA | AKGVEFR | 919 | ACI16088.1 |
| | PERTUSSIS | | | |
| 37 | MEASLES VIRUS | AKWAVPTTRTDDKLR | 920 | P08362.1 |
| | STRAIN | | | |
| | EDMONSTON | | | |
| 38 | MEASLES VIRUS | ALAEVLKKPV | 921 | ABO69699.1 |
| | STRAIN | | | |
| | EDMONSTON | | | |
| 39 | MEASLES VIRUS | ALGVINTLEWIPRFK | 922 | P08362.1 |
| | STRAIN | | | |
| | EDMONSTON | | | |
| 40 | MEASLES VIRUS | ALHQSMLNSQAIDNL | 923 | P69353.1 |
| | STRAIN | | | |
| | EDMONSTON | | | |
| 41 | MEASLES VIRUS | ALIGILSLFV | 924 | ABI54110.1 |
| | STRAIN | | | |
| | EDMONSTON | | | |
| 42 | RUBELLA VIRUS | ALLNTPPPYQVSCGGESDRA | 925 | CAJ88851.1 |
| 43 | RUBELLA VIRUS | ALLNTPPPYQVSCGGESDRASARV | 926 | CAJ88851.1 |
| | STRAIN M33 | | | |
| 44 | RUBELLA VIRUS | ALVEGLAPGGGNCHL | 927 | BAA28178.1 |
| 45 | BORDETELLA | AMAAWSERAGEA | 928 | P04977.1 |
| | PERTUSSIS | | | |
| 46 | MEASLES VIRUS | ANCASILCKCYTTGT | 929 | P69353.1 |
| | STRAIN | | | |
| | EDMONSTON | | | |
| 47 | BORDETELLA | ANPNPYTSRRSV | 930 | P04977.1 |
| | PERTUSSIS | | | |
| 48 | RUBELLA VIRUS | APGPGEVW | 931 | CAJ88851.1 |
| 49 | RUBELLA VIRUS | APLPPHTTERIETRSARHPWRIR | 932 | ABD64214.1 |
| 50 | RUBELLA VIRUS | APPMPPQPPRAHGQHYGHHHHQLPF | 933 | CAA33016.1 |
| | VACCINE STRAIN | LG | | |
| | RA27/3 | | | |
| 51 | RUBELLA VIRUS | APPTLPQPPCAHGQHYGHHHHQLPF | 934 | P07566.1 |
| | STRAIN THERIEN | LG | | |
| 52 | RUBELLA VIRUS | APPTLPQPPRAHGQHYGHHHHQLPF | 935 | ABD64214.1 |
| | LG | | | |
| 53 | BORDETELLA | APQPGPQPPQPPQPQPEAPAPQ | 936 | P14283.3 |
| | PERTUSSIS | | | |
| 54 | RUBELLA VIRUS | AQLASYFNPGGSYYK | 937 | BAA28178.1 |
| 55 | MEASLES VIRUS | ARAAHLPTGTPLD | 938 | P04851.1 |
| | STRAIN | | | |
| | EDMONSTON | | | |
| 56 | MEASLES VIRUS | ARLVSEIAMHTTEDK | 939 | P04851.1 |
| | STRAIN | | | |
| | EDMONSTON | | | |
| 57 | MEASLES VIRUS | ARLVSEIAMHTTEDKISRAV | 940 | P04851.1 |
| | STRAIN | | | |
| | EDMONSTON | | | |
| 58 | MEASLES VIRUS | ASDVETAEGGEIHELLR | 941 | P03422.1 |
| | STRAIN | | | |
| | EDMONSTON-B | | | |
| 59 | MEASLES | ASDVETAEGGEIHELLRLQ | 942 | ABO69699.1 |
| | MORBILLIVIRUS | | | |
| 60 | MEASLES VIRUS | ASDVETAEGGEIHELLRLQSR | 943 | P03422.1 |
| | STRAIN | | | |
| | EDMONSTON-B | | | |
| 61 | MEASLES | ASDVETAEGGEIHKLLRLQ | 944 | AAA63285.1 |
| | MORBILLIVIRUS | | | |
| 62 | RUBELLA VIRUS | ASDVLPGHWLQG | 945 | NP_740663.1 |
| | STRAIN M33 | | | |
| 63 | MEASLES VIRUS | ASELGITAEDARLVS | 946 | P04851.1 |
| | STRAIN | | | |
| | EDMONSTON | | | |
| 64 | MEASLES VIRUS | ASELGITAEDARLVSEIAMH | 947 | P04851.1 |
| | STRAIN | | | |
| | EDMONSTON | | | |
| 65 | MEASLES VIRUS | ASESSQDPQDSRR | 948 | P04851.1 |
| | STRAIN | | | |
| | EDMONSTON | | | |
| 66 | MEASLES VIRUS | ASILCKCYTTGTIIN | 949 | P69353.1 |
| | STRAIN | | | |
| | EDMONSTON | | | |
| 67 | RUBELLA VIRUS | ASPVCQRHSPDCSRL | 950 | BAA28178.1 |
| 68 | BORDETELLA | ASQARWTGATRA | 951 | BAF35031.1 |
| | PERTUSSIS | | | |
| 69 | RUBELLA VIRUS | ASYFNPGGSYYKQYHPTACEVEPAFG | 952 | P07566.1 |
| | STRAIN THERIEN | HS | | |
| 70 | MEASLES VIRUS | ASYKVMTRSSHQSLV | 953 | P69353.1 |
| | STRAIN | | | |
| | EDMONSTON | | | |
| 71 | BORDETELLA | ASYVKKPKEDVD | 954 | ACI16088.1 |
| | PERTUSSIS | | | |
| 72 | MEASLES VIRUS | ATAAQITAGIALHQS | 955 | P69353.1 |
| | STRAIN | | | |
| | EDMONSTON | | | |
| 73 | RUBELLA VIRUS | ATPERPRL | 956 | CAJ88851.1 |
| 74 | MEASLES VIRUS | AVCLGGLIGIPALIC | 957 | P69353.1 |
| | STRAIN | | | |
| | EDMONSTON | | | |
| 75 | MEASLES VIRUS | AVGPRQAQVSF | 958 | P04851.1 |
| | STRAIN | | | |
| | EDMONSTON | | | |
| 76 | RUBELLA VIRUS | AVNAYSSGGYAQLAS | 959 | BAA28178.1 |
| 77 | RUBELLA VIRUS | AVSETRQTWAEWAAA | 960 | BAA28178.1 |
| 78 | MEASLES VIRUS | AVTAPDTAADSELRR | 961 | P04851.1 |
| | STRAIN | | | |
| | EDMONSTON | | | |
| 79 | MEASLES VIRUS | AVTAPDTAADSELRRWIKYT | 962 | P04851.1 |
| | STRAIN | | | |
| | EDMONSTON | | | |
| 80 | BORDETELLA | AYGGIIKDAPPGAGFIYRETFC | 963 | P04979.1 |
| | PERTUSSIS | | | |
| 81 | RUBELLA VIRUS | CALPLAGLLACCAKC | 964 | BAA28178.1 |
| 82 | RUBELLA VIRUS | CARIWNGTQRACTFW | 965 | BAA28178.1 |
| 83 | MEASLES VIRUS | CARTLVSGSFGNRFI | 966 | P69353.1 |
| | STRAIN | | | |
| | EDMONSTON | | | |
| 84 | BORDETELLA | CASPYEGRYRDMYDALRBRLLY | 967 | SRC280066 |
| | PERTUSSIS | | | |
| 85 | BORDETELLA | CAVFVRSGQPVIGA | 968 | AAA83981.1 |
| | PERTUSSIS | | | |
| 86 | RUBELLA VIRUS | CCAKCLYYLRGAIAPR | 969 | BAA28178.1 |
| 87 | MEASLES VIRUS | CCRGRCNKKGEQVGM | 970 | P69353.1 |
| | STRAIN | | | |
| | EDMONSTON | | | |
| 88 | RUBELLA VIRUS | CEIPTDVSCEGLGAW | 971 | BAA28178.1 |
| 89 | BORDETELLA | CFGKDLKRPGSSPMEV | 972 | P0A3R5.1 |
| | PERTUSSIS | | | |
| 90 | MEASLES | CFQQACKGKIQALCE | 973 | P06830.1 |
| | MORBILLIVIRUS | | | |
| 91 | MEASLES | CFQQACKGKIQALCENPEWAPLKDN | 974 | AAR89413.1 |
| | MORBILLIVIRUS | RIPS | | |
| 92 | RUBELLA VIRUS | CGGESDRASARVIDP | 975 | BAA28178.1 |
| 93 | BORDETELLA | CITTIYKTGQPAADHYYSKVTA | 976 | P04979.1 |
| | PERTUSSIS | | | |
| 94 | MEASLES | CKGKIQALCENPEWA | 977 | AAR89413.1 |
| | MORBILLIVIRUS | | | |
| 95 | MEASLES VIRUS | CKPWQESRKNKAQ | 978 | P04851.1 |
| | STRAIN | | | |
| | EDMONSTON | | | |
| 96 | MEASLES VIRUS | CNKKGEQVGMSRPGL | 979 | P69353.1 |
| | STRAIN | | | |
| | EDMONSTON | | | |
| 97 | RUBELLA VIRUS | CNVTTEHPFCNTPHG | 980 | BAA28178.1 |
| 98 | BORDETELLA | CQVGSSNSAF | 981 | P04977.1 |
| | PERTUSSIS | | | |
| 99 | MEASLES | CSGPTTIRGQFS | 982 | P08362.1 |
| | MORBILLIVIRUS | | | |
| 100 | BORDETELLA | CTSPYDGKYWSMYSRL | 983 | AAA83981.1 |
| | PERTUSSIS | | | |
| 101 | MEASLES VIRUS | CVLADSESGGHITHS | 984 | P08362.1 |
| | STRAIN | | | |
| | EDMONSTON | | | |
| 102 | MEASLES | CYTTGTIINQDPDKILTYIAADHC | 985 | AAF02706.1 |
| | MORBILLIVIRUS | | | |
| 103 | RUBELLA VIRUS | DADDPLLR | 986 | CAJ88851.1 |
| 104 | MEASLES VIRUS | DARAAHLPTGTPLDI | 987 | P04851.1 |
| | STRAIN | | | |
| | EDMONSTON | | | |
| 105 | MEASLES VIRUS | DARAAHLPTGTPLDIDTASE | 988 | P04851.1 |
| | STRAIN | | | |
| | EDMONSTON | | | |
| 106 | MEASLES VIRUS | DCHAPTYLPAEVDGD | 989 | P08362.1 |
| | STRAIN | | | |
| | EDMONSTON | | | |
| 107 | RUBELLA VIRUS | DCSRLVGATPERPRL | 990 | BAA28178.1 |
| 108 | MEASLES VIRUS | DDKLRMETCFQQACK | 991 | P08362.1 |
| | STRAIN | | | |
| | EDMONSTON | | | |
| 109 | RUBELLA VIRUS | DDPLLRTA | 992 | CAJ88851.1 |
| 110 | RUBELLA VIRUS | DDPLLRTAPGPGEVW | 993 | BAA28178.1 |
| 111 | BORDETELLA | DDPPATVYRYD | 994 | P04977.1 |
| | PERTUSSIS | | | |
| 112 | BORDETELLA | DDPPATVYRYDSRPPED | 995 | CAD44970.1 |
| | PERTUSSIS | | | |
| 113 | BORDETELLA | DDPPATVYRYDSRPPEDV | 996 | ACI04548.1 |
| | PERTUSSIS | | | |
| 114 | MEASLES | DEVGLRTPQRFTDLV | 997 | P06830.1 |
| | MORBILLIVIRUS | | | |
| 115 | MEASLES VIRUS | DHCPVVEVNGVTIQV | 998 | P69353.1 |
| | STRAIN | | | |
| | EDMONSTON | | | |
| 116 | MEASLES VIRUS | DIDTASESSQDPQ | 999 | P04851.1 |
| | STRAIN | | | |
| | EDMONSTON | | | |
| 117 | MEASLES VIRUS | DINKVLEKLGYSGGD | 1000 | P69353.1 |
| | STRAIN | | | |
| | EDMONSTON | | | |
| 118 | BORDETELLA | DLIAYKQ | 1001 | ACI16088.1 |
| | PERTUSSIS | | | |
| 119 | MEASLES VIRUS | DLIGQKLGLKLLRYY | 1002 | P69353.1 |
| | STRAIN | | | |
| | EDMONSTON | | | |
| 120 | RUBELLA VIRUS | DLQKALEAQSRALRAELAA | 1003 | P07566.1 |
| 121 | MEASLES | DLQYVLATYDTSRVE | 1004 | P06830.1 |
| | MORBILLIVIRUS | | | |
| 122 | MEASLES VIRUS | DLSLRRFMV | 1005 | P04851.1 |
| | STRAIN | | | |
| | EDMONSTON | | | |
| 123 | MEASLES VIRUS | DLSNCMVALGELKLA | 1006 | P08362.1 |
| | STRAIN | | | |
| | EDMONSTON | | | |
| 124 | RUBELLA VIRUS | DLVEYIMNYTGNQQSRWGLGSPNC | 1007 | CAJ88851.1 |
| 125 | MEASLES | DLVKFISDKIKFLNP | 1008 | AAR89413.1 |
| | MORBILLIVIRUS | | | |
| 126 | MEASLES | DLVKFISTKIKFLNP | 1009 | SRC280117 |
| | MORBILLIVIRUS | | | |
| 127 | MEASLES VIRUS | DLYKSNHNNV | 1010 | P08362.1 |
| | STRAIN | | | |
| | EDMONSTON | | | |
| 128 | BORDETELLA | DNVLDHLTGR | 1011 | ACI04548.1 |
| | PERTUSSIS | | | |
| 129 | BORDETELLA | DNVLDHLTGRSC | 1012 | P04977.1 |
| | PERTUSSIS | | | |
| 130 | BORDETELLA | DNVLDHLTGRSCQ | 1013 | P04977.1 |
| | PERTUSSIS | | | |
| 131 | MEASLES | DPDKILTYIAA | 1014 | AAF02706.1 |
| | MORBILLIVIRUS | | | |
| 132 | RUBELLA VIRUS | DPGDLVEYIMNYTGNQQSR | 1015 | P07566.1 |
| | STRAIN THERIEN | | | |
| 133 | RUBELLA VIRUS | DPLLRTAP | 1016 | CAJ88851.1 |
| 134 | RUBELLA VIRUS | DPLLRTAPGPGEVWVTPVIGSQ | 1017 | CAJ88851.1 |
| 135 | MEASLES VIRUS | DPQDSRRSAEPLL | 1018 | P04851.1 |
| | STRAIN | | | |
| | EDMONSTON | | | |
| 136 | MEASLES VIRUS | DPVIDRLYLSSHRGV | 1019 | P08362.1 |
| | STRAIN | | | |
| | EDMONSTON | | | |
| 137 | MEASLES VIRUS | DQILRSMKGLSSTSI | 1020 | P69353.1 |
| | STRAIN | | | |
| | EDMONSTON | | | |
| 138 | MEASLES | DQYCADVAAEELMNA | 1021 | P06830.1 |
| | MORBILLIVIRUS | | | |
| 139 | MEASLES VIRUS | DSESGGHITH | 1022 | P08362.1 |
| | STRAIN | | | |
| | EDMONSTON | | | |
| 140 | MEASLES VIRUS | DTASESSQDPQDS | 1023 | P04851.1 |
| | STRAIN | | | |
| | EDMONSTON | | | |
| 141 | RUBELLA VIRUS | DTVMSVFALASYVQH | 1024 | BAA28178.1 |
| 142 | BORDETELLA | DVFQNGFTAWGNND | 1025 | P04977.1 |
| | PERTUSSIS | | | |
| 143 | RUBELLA VIRUS | DVGAVPPGKFVTAAL | 1026 | BAA28178.1 |
| 144 | CORYNEBACTERIUM | DVNKSKTHISVNGRKI | 1027 | CAE11230.1 |
| | DIPHTHERIAE | | | |
| 145 | RUBELLA VIRUS | DVSCEGLGAWVPAAP | 1028 | BAA28178.1 |
| 146 | RUBELLA VIRUS | DWASPVCQRHSPDCSRLVGATPERPR | 1029 | P07566.1 |
| | STRAIN THERIEN | L | | |
| 147 | MEASLES VIRUS | EARESYRETGPSR | 1030 | P04851.1 |
| | STRAIN | | | |
| | EDMONSTON | | | |
| 148 | BORDETELLA | EAVEAERAGRGTG | 1031 | ACI04548.1 |
| | PERTUSSIS | | | |
| 149 | MEASLES VIRUS | EDAKELLESSDQILR | 1032 | P69353.1 |
| | STRAIN | | | |
| | EDMONSTON | | | |
| 150 | MEASLES VIRUS | EDRRVKQSRGEAR | 1033 | P04851.1 |
| | STRAIN | | | |
| | EDMONSTON | | | |
| 151 | MEASLES VIRUS | EDSITIPYQGSGKGV | 1034 | P08362.1 |
| | STRAIN | | | |
| | EDMONSTON | | | |
| 152 | RUBELLA VIRUS | EEAFTYLCTAPGCAT | 1035 | BAA28178.1 |
| 153 | MEASLES VIRUS | EGFNMILGTILAQIW | 1036 | P04851.1 |
| | STRAIN | | | |
| | EDMONSTON | | | |
| 154 | MEASLES VIRUS | EGFNMILGTILAQIWVLLAK | 1037 | P04851.1 |
| | STRAIN | | | |
| | EDMONSTON | | | |
| 155 | RUBELLA VIRUS | EHPFCNTPHGQLEVQ | 1038 | BAA28178.1 |
| 156 | MEASLES VIRUS | EISDIEVQDPEGFNM | 1039 | P04851.1 |
| | STRAIN | | | |
| | EDMONSTON | | | |
| 157 | MEASLES VIRUS | EISDIEVQDPEGFNMILGTI | 1040 | P04851.1 |
| | STRAIN | | | |
| | EDMONSTON | | | |
| 158 | MEASLES VIRUS | EKPNLSSKRSE | 1041 | P08362.1 |
| | STRAIN | | | |
| | EDMONSTON | | | |
| 159 | MEASLES VIRUS | ELKLAALCHGEDSIT | 1042 | P08362.1 |
| | STRAIN | | | |
| | EDMONSTON | | | |
| 160 | MEASLES | ELMNALVNSTLLETR | 1043 | P06830.1 |
| | MORBILLIVIRUS | | | |
| 161 | MEASLES VIRUS | ELPRL | 1044 | P04851.1 |
| | STRAIN | | | |
| | EDMONSTON | | | |
| 162 | MEASLES | ENPEWAPLKDNRIPSYGVLSVDL | 1045 | AAR89413.1 |
| | MORBILLIVIRUS | | | |
| 163 | MEASLES VIRUS | EPIRDALNAMTQNIR | 1046 | P69353.1 |
| | STRAIN | | | |
| | EDMONSTON | | | |
| 164 | MEASLES VIRUS | EQVGMSRPGLKPDLT | 1047 | P69353.1 |
| | STRAIN | | | |
| | EDMONSTON | | | |
| 165 | RUBELLA VIRUS | ERPRLRLV | 1048 | CAJ88851.1 |
| 166 | RUBELLA VIRUS | ERPRLRLVDADDPLL | 1049 | BAA28178.1 |
| 167 | MEASLES VIRUS | ESPGQLIQRITDDPDVS | 1050 | P04851.1 |
| | CAM/RB | | | |
| 168 | MEASLES VIRUS | ESRGIKARITHVDTE | 1051 | P69353.1 |
| | STRAIN | | | |
| | EDMONSTON | | | |
| 169 | MEASLES VIRUS | ESSCTFMPEGTVCSQ | 1052 | P69353.1 |
| | STRAIN | | | |
| | EDMONSTON | | | |
| 170 | MEASLES VIRUS | ESSQDPQDSRRSA | 1053 | P04851.1 |
| | STRAIN | | | |
| | EDMONSTON | | | |
| 171 | MEASLES VIRUS | ETRTTNQFLAVSKGN | 1054 | P08362.1 |
| | STRAIN | | | |
| | EDMONSTON | | | |
| 172 | MEASLES VIRUS | EVDGDVKLSSNLVIL | 1055 | P08362.1 |
| | STRAIN | | | |
| | EDMONSTON | | | |
| 173 | MEASLES VIRUS | EVNGVTIQV | 1056 | P26031.1 |
| | STRAIN | | | |
| | EDMONSTON-B | | | |
| 174 | RUBELLA VIRUS | EVWVTPVI | 1057 | CAJ88851.1 |
| 175 | RUBELLA VIRUS | EVWVTPVIGSQA | 1058 | BAA19893.1 |
| 176 | RUBELLA VIRUS | EWAAAHWWQLTLGAT | 1059 | BAA28178.1 |
| 177 | MEASLES | EWIPRFKVSPYLFTV | 1060 | P06830.1 |
| | MORBILLIVIRUS | | | |
| 178 | BORDETELLA | FEYVDTYGDNAG | 1061 | P04977.1 |
| | PERTUSSIS | | | |
| 179 | MEASLES | FGPLITHGSGMDLYK | 1062 | P06830.1 |
| | MORBILLIVIRUS | | | |
| 180 | MEASLES VIRUS | FIFDALAEV | 1063 | ABK40531.1 |
| | STRAIN | | | |
| | EDMONSTON | | | |
| 181 | MEASLES VIRUS | FISDKIKFL | 1064 | P08362.1 |
| | STRAIN | | | |
| | EDMONSTON | | | |
| 182 | MEASLES VIRUS | FKRNKDKPPITSGSG | 1065 | P04851.1 |
| | STRAIN | | | |
| | EDMONSTON | | | |
| 183 | MEASLES VIRUS | FKRNKDKPPITSGSGGAIRG | 1066 | P04851.1 |
| | STRAIN | | | |
| | EDMONSTON | | | |
| 184 | RUBELLA VIRUS | FKTVRPVALPRTLAP | 1067 | BAA28178.1 |
| 185 | MEASLES VIRUS | FLMDRHIIV | 1068 | ABK40531.1 |
| | STRAIN | | | |
| | EDMONSTON | | | |
| 186 | MEASLES VIRUS | FMAVLLTLQTPTGQI | 1069 | P69353.1 |
| | STRAIN | | | |
| | EDMONSTON | | | |
| 187 | MEASLES VIRUS | FMPEGTVCSQNALYP | 1070 | P69353.1 |
| | STRAIN | | | |
| | EDMONSTON | | | |
| 188 | MEASLES | FMYMSLLGV | 1071 | AAN09804.1 |
| | MORBILLIVIRUS | | | |
| 189 | MEASLES VIRUS | FNVPIKEAGEDCHAP | 1072 | P08362.1 |
| | STRAIN | | | |
| | EDMONSTON | | | |
| 190 | MEASLES | FRDLTWCINPPERIK | 1073 | AAC35876.2 |
| | MORBILLIVIRUS | | | |
| 191 | MEASLES VIRUS | FSHDDPISSDQSRFG | 1074 | P04851.1 |
| | STRAIN | | | |
| | EDMONSTON | | | |
| 192 | MEASLES VIRUS | FSHDDPISSDQSRFGWFENK | 1075 | P04851.1 |
| | STRAIN | | | |
| | EDMONSTON | | | |
| 193 | MEASLES | FTDLVKFISDKIKFL | 1076 | P06830.1 |
| | MORBILLIVIRUS | | | |
| 194 | MEASLES | FTWDQKLWCRHFCVL | 1077 | P06830.1 |
| | MORBILLIVIRUS | | | |
| 195 | BORDETELLA | FVRDGQSVIGACASPYEGRYRDLYD | 1078 | SRC280066 |
| | PERTUSSIS | ALRRLLY | | |
| 196 | BORDETELLA | FVRSGQPVIGACTSPYDGKYWSILYS | 1079 | SRC280066 |
| | PERTUSSIS | RLRKMLY | | |
| 197 | MEASLES | FYKDNPHPKGSRIVI | 1080 | P06830.1 |
| | MORBILLIVIRUS | | | |
| 198 | BORDETELLA | GAASSYFEYVDTYG | 1081 | ACI04548.1 |
| | PERTUSSIS | | | |
| 199 | BORDETELLA | GAFDLKTTFCIMTTRNTGQPA | 1082 | AAA83981.1 |
| | PERTUSSIS | | | |
| 200 | MEASLES VIRUS | GALIGILSLFVESPG | 1083 | P04851.1 |
| | STRAIN | | | |
| | EDMONSTON | | | |
| 201 | MEASLES VIRUS | GALIGILSLFVESPGQLIQR | 1084 | P04851.1 |
| | STRAIN | | | |
| | EDMONSTON | | | |
| 202 | RUBELLA VIRUS | GATPERPR | 1085 | CAJ88851.1 |
| 203 | BORDETELLA | GAYGRCPNGTRALTVAELRGNAEL | 1086 | P04979.1 |
| | PERTUSSIS | | | |
| 204 | RUBELLA VIRUS | GCFAPWDLEATGACI | 1087 | BAA28178.1 |
| 205 | MEASLES | GDINKVLEKLGYS | 1088 | BAB60865.1 |
| | MORBILLIVIRUS | | | |
| 206 | MEASLES | GDINKVLEKLGYSGGDLLG | 1089 | AAL29688.1 |
| | MORBILLIVIRUS | | | |
| 207 | RUBELLA VIRUS | GDLRAVHHRPVPA | 1090 | CAA28880.1 |
| 208 | RUBELLA VIRUS | GDLVEYIMNYTGNQQ | 1091 | BAA28178.1 |
| 209 | MEASLES VIRUS | GDSSITTRSRLLDRL | 1092 | P04851.1 |
| | STRAIN | | | |
| | EDMONSTON | | | |
| 210 | MEASLES VIRUS | GDSSITTRSRLLDRLVRLIG | 1093 | P04851.1 |
| | STRAIN | | | |
| | EDMONSTON | | | |
| 211 | MEASLES | GEDCHAPTYLPAEVD | 1094 | P06830.1 |
| | MORBILLIVIRUS | | | |
| 212 | MEASLES VIRUS | GELSTLESLMNLYQQ | 1095 | P04851.1 |
| | STRAIN | | | |
| | EDMONSTON | | | |
| 213 | MEASLES VIRUS | GELSTLESLMNLYQQMGKPA | 1096 | P04851.1 |
| | STRAIN | | | |
| | EDMONSTON | | | |
| 214 | MUMPS | GEQARYLALLEA | 1097 | P21186.1 |
| | RUBULAVIRUS | | | |
| 215 | RUBELLA VIRUS | GEVWVT | 1098 | BAA19893.1 |
| 216 | RUBELLA VIRUS | GEVWVTPV | 1099 | CAJ88851.1 |
| 217 | RUBELLA VIRUS | GEVWVTPVIGSQAR | 1100 | BAA19893.1 |
| 218 | BORDETELLA | GEYGGVIKDGTPGGA | 1101 | AAA83981.1 |
| | PERTUSSIS | | | |
| 219 | RUBELLA VIRUS | GFLSGVGPMRLRHGADT | 1102 | SRC265968 |
| 220 | MEASLES VIRUS | GFRASDVETAEGGEIHELLRLQ | 1103 | P03422.1 |
| | STRAIN | | | |
| | EDMONSTON-B | | | |
| 221 | BORDETELLA | GGAVPGGAVPGGAVPGGFGPGGFGP | 1104 | P14283.3 |
| | PERTUSSIS | | | |
| 222 | BORDETELLA | GGAVPGGAVPGGFGPGGFGPGGFGP | 1105 | CAA09475.1 |
| | PERTUSSIS | | | |
| 223 | BORDETELLA | GGAVPGGAVPGGFGPGGFGPGGFGP | 1106 | CAA09474.1 |
| | PERTUSSIS | GGFGP | | |
| 224 | MEASLES | GGHITHSGMVGMGVS | 1107 | P06830.1 |
| | MORBILLIVIRUS | | | |
| 225 | MEASLES | GILESRGIKARITHVDTESY | 1108 | P26032.1 |
| | MORBILLIVIRUS | | | |
| 226 | BORDETELLA | GITGETTTTEYSNARYV | 1109 | CAD44970.1 |
| | PERTUSSIS | | | |
| 227 | MEASLES VIRUS | GKEDRRVKQSRGE | 1110 | P04851.1 |
| | STRAIN | | | |
| | EDMONSTON | | | |
| 228 | BORDETELLA | GKVTNGS | 1111 | ACI16088.1 |
| | PERTUSSIS | | | |
| 229 | RUBELLA VIRUS | GLGAWVPAAPCARIW | 1112 | BAA28178.1 |
| 230 | MEASLES VIRUS | GLIGIPALICCCRGR | 1113 | P69353.1 |
| | STRAIN | | | |
| | EDMONSTON | | | |
| 231 | RUBELLA VIRUS | GLLACCAKCLYYLRGAIAPR | 1114 | P07566.1 |
| | STRAIN THERIEN | | | |
| 232 | MEASLES | GLLAIAGIRLHRAAI | 1115 | P06830.1 |
| | MORBILLIVIRUS | | | |
| 233 | RUBELLA VIRUS | GLQPRADMAAPPTLPQ | 1116 | NP_740663.1 |
| 234 | MEASLES | GMGVSCTVTREDGTNRR | 1117 | AAR89413.1 |
| | MORBILLIVIRUS | | | |
| 235 | MEASLES | GMYGGTYLVEKP | 1118 | AAR89413.1 |
| | MORBILLIVIRUS | | | |
| 236 | BORDETELLA | GNAELQTYLRQITPGWSIYGLYDGTY | 1119 | P04979.1 |
| | PERTUSSIS | LG | | |
| 237 | RUBELLA VIRUS | GNCHLTVNGEDVGAV | 1120 | BAA28178.1 |
| 238 | BORDETELLA | GNNDNVLDHLTGR | 1121 | P04977.1 |
| | PERTUSSIS | | | |
| 239 | BORDETELLA | GNNDNVLDHLTGRSC | 1122 | P04977.1 |
| | PERTUSSIS | | | |
| 240 | MEASLES VIRUS | GNRFILSQGNLIANC | 1123 | P69353.1 |
| | STRAIN | | | |
| | EDMONSTON | | | |
| 241 | RUBELLA VIRUS | GNRGRGQRRDWSRAPPPPEERQETR | 1124 | P07566.1 |
| | SQTPAPKPS | | | |
| 242 | RUBELLA VIRUS | GPGEVWVT | 1125 | CAJ88851.1 |
| 243 | RUBELLA VIRUS | GPMRLRHGADTRCGRLI | 1126 | P07566.1 |
| | STRAIN THERIEN | | | |
| 244 | BORDETELLA | GPNHTKV | 1127 | ACI16083.1 |
| | PERTUSSIS | | | |
| 245 | MEASLES VIRUS | GPRQAQVSF | 1128 | P10050.1 |
| | STRAIN HALLE | | | |
| 246 | MEASLES VIRUS | GPRQAQVSFLQGDQS | 1129 | P04851.1 |
| | STRAIN | | | |
| | EDMONSTON | | | |
| 247 | MEASLES VIRUS | GPRQAQVSFLQGDQSENELP | 1130 | P04851.1 |
| | STRAIN | | | |
| | EDMONSTON | | | |
| 248 | MEASLES | GRGYNVSSIVTMTSQ | 1131 | P06830.1 |
| | MORBILLIVIRUS | | | |
| 249 | BORDETELLA | GRTPFII | 1132 | ACI16083.1 |
| | PERTUSSIS | | | |
| 250 | RUBELLA VIRUS | GSPNCHGPDWASPVC | 1133 | BAA28178.1 |
| 251 | RUBELLA VIRUS | GSQARKCGLHIRAGP | 1134 | BAA28178.1 |
| 252 | BORDETELLA | GSSNSAFVSTSSSRR | 1135 | P04977.1 |
| | PERTUSSIS | | | |
| 253 | MEASLES VIRUS | GSTKSCARTLVSGSF | 1136 | P69353.1 |
| | STRAIN | | | |
| | EDMONSTON | | | |
| 254 | RUBELLA VIRUS | GSYYKQYHPTACEVE | 1137 | BAA28178.1 |
| 255 | RUBELLA VIRUS | GTHTTAVSETRQTWA | 1138 | BAA28178.1 |
| 256 | MEASLES VIRUS | GTIINQDPDKILTYI | 1139 | P69353.1 |
| | STRAIN | | | |
| | EDMONSTON | | | |
| 257 | BORDETELLA | GTLVRMAPVIG | 1140 | ADA85124.1 |
| | PERTUSSIS | | | |
| 258 | MEASLES VIRUS | GTPLDIDTASESS | 1141 | P04851.1 |
| | STRAIN | | | |
| | EDMONSTON | | | |
| 259 | BORDETELLA | GTYLGQAYGGIIKDAPPGAGFIYRETF | 1142 | P04979.1 |
| | PERTUSSIS | C | | |
| 260 | BORDETELLA | GVATKGLGVHAKSSDWG | 1143 | P15318.2 |
| | PERTUSSIS | | | |
| 261 | CORYNEBACTERIUM | GVLLPTIPGKLDVNKSKTHI | 1144 | AAV70486.1 |
| | DIPHTHERIAE | | | |
| 262 | MEASLES | GVLSVDLSLTVELKI | 1145 | P06830.1 |
| | MORBILLIVIRUS | | | |
| 263 | MEASLES | GVPIELQVECFTWDQ | 1146 | P06830.1 |
| | MORBILLIVIRUS | | | |
| 264 | MEASLES VIRUS | GVSCTVTREDGTNRR | 1147 | P08362.1 |
| | STRAIN | | | |
| | EDMONSTON | | | |
| 265 | MEASLES VIRUS | GVSYNIGSQEWYTTV | 1148 | P69353.1 |
| | STRAIN | | | |
| | EDMONSTON | | | |
| 266 | MEASLES VIRUS | GYNVSSIVTMTSQGM | 1149 | P08362.1 |
| | STRAIN | | | |
| | EDMONSTON | | | |
| 267 | MEASLES | HFCVLADSESGGHIT | 1150 | P06830.1 |
| | MORBILLIVIRUS | | | |
| 268 | MEASLES | HGEDSITIPYQGSGK | 1151 | P06830.1 |
| | MORBILLIVIRUS | | | |
| 269 | RUBELLA VIRUS | HGPDWASP | 1152 | BAA19893.1 |
| 270 | RUBELLA VIRUS | HGPDWASPVCQRHSP | 1153 | BAA28178.1 |
| 271 | RUBELLA VIRUS | HGPDWASPVCQRHSPDCSRLVG | 1154 | CAJ88851.1 |
| 272 | RUBELLA VIRUS | HGPDWASPVCQRHSPDCSRLVGATPE | 1155 | CAJ88851.1 |
| | STRAIN M33 | RPRLRLV | | |
| 273 | MEASLES VIRUS | HITHSGMEGMGVSCT | 1156 | P08362.1 |
| | STRAIN | | | |
| | EDMONSTON | | | |
| 274 | MEASLES | HKSLSTNLDVTNSIE | 1157 | P06830.1 |
| | MORBILLIVIRUS | | | |
| 275 | MEASLES VIRUS | HLMIDRPYV | 1158 | P08362.1 |
| | STRAIN | | | |
| | EDMONSTON | | | |
| 276 | MEASLES VIRUS | HLPTGTPLDIDTA | 1159 | P04851.1 |
| | STRAIN | | | |
| | EDMONSTON | | | |
| 277 | MEASLES VIRUS | HLPTGTPLDIDTATESSQDPQDSR | 1160 | Q77M43.1 |
| | STRAIN | | | |
| | EDMONSTON-B | | | |
| 278 | MEASLES | HMTNYLEQPVSNDLS | 1161 | P06830.1 |
| | MORBILLIVIRUS | | | |
| 279 | MEASLES VIRUS | HQSLVIKLMPNITLL | 1162 | P69353.1 |
| | STRAIN | | | |
| | EDMONSTON | | | |
| 280 | MEASLES | HRAAIYTAEIHKSLS | 1163 | P06830.1 |
| | MORBILLIVIRUS | | | |
| 281 | BORDETELLA | HRMQEAVEAERAGRGTGH | 1164 | P04977.1 |
| | PERTUSSIS | | | |
| 282 | MEASLES VIRUS | HVDTESYFIVLSIAY | 1165 | P69353.1 |
| | STRAIN | | | |
| | EDMONSTON | | | |
| 283 | MEASLES VIRUS | HWGNLSKIGVVGIGS | 1166 | P69353.1 |
| | STRAIN | | | |
| | EDMONSTON | | | |
| 284 | RUBELLA VIRUS | HWWQLTLGATCALPL | 1167 | BAA28178.1 |
| 285 | RUBELLA VIRUS | HYRNASDVLPGHWLQGGWGCYNL | 1168 | NP_740663.1 |
| 286 | MEASLES VIRUS | IDLGPPISLERLDVG | 1169 | P69353.1 |
| | STRAIN | | | |
| | EDMONSTON | | | |
| 287 | MEASLES VIRUS | IEAIRQAGQEMILAV | 1170 | P69353.1 |
| | STRAIN | | | |
| | EDMONSTON | | | |
| 288 | RUBELLA VIRUS | IETRSARHP | 1171 | CAA28880.1 |
| | STRAIN M33 | | | |
| 289 | MEASLES VIRUS | IGSQEWYTTVPKYVA | 1172 | P69353.1 |
| | STRAIN | | | |
| | EDMONSTON | | | |
| 290 | MEASLES VIRUS | IKGVIVHRLEGVSYN | 1173 | P69353.1 |
| | STRAIN | | | |
| | EDMONSTON | | | |
| 291 | MEASLES VIRUS | IKHIIIVPIPGDSSI | 1174 | P04851.1 |
| | STRAIN | | | |
| | EDMONSTON | | | |
| 292 | MEASLES VIRUS | IKHIIIVPIPGDSSITTRSR | 1175 | P04851.1 |
| | STRAIN | | | |
| | EDMONSTON | | | |
| 293 | BORDETELLA | IKLKDCP | 1176 | ACI16083.1 |
| | PERTUSSIS | | | |
| 294 | MEASLES VIRUS | IKLMPNITLLNNCTR | 1177 | P69353.1 |
| | STRAIN | | | |
| | EDMONSTON | | | |
| 295 | MEASLES | ILLERLDVGT | 1178 | AAF85664.1 |
| | MORBILLIVIRUS | | | |
| 296 | MEASLES | ILPGQDLQYV | 1179 | P08362.1 |
| | MORBILLIVIRUS | | | |
| 297 | MEASLES VIRUS | ILTYIAADHCPVVEV | 1180 | P69353.1 |
| | STRAIN | | | |
| | EDMONSTON | | | |
| 298 | MEASLES | INQDPDKILTY | 1181 | AAL29688.1 |
| | MORBILLIVIRUS | | | |
| 299 | MEASLES VIRUS | IPRFKVSPYLFNVPI | 1182 | P08362.1 |
| | STRAIN | | | |
| | EDMONSTON | | | |
| 300 | MEASLES VIRUS | IQALSYALGGDINKV | 1183 | P69353.1 |
| | STRAIN | | | |
| | EDMONSTON | | | |
| 301 | RUBELLA VIRUS | IRAGPYGHATVEMPE | 1184 | BAA28178.1 |
| 302 | BORDETELLA | IRMGTDK | 1185 | ACI16088.1 |
| | PERTUSSIS | | | |
| 303 | MEASLES VIRUS | ISNFDESSCTFMPEG | 1186 | P69353.1 |
| | STRAIN | | | |
| | EDMONSTON | | | |
| 304 | MEASLES VIRUS | ITAGIALHQSMLNSQ | 1187 | P69353.1 |
| | STRAIN | | | |
| | EDMONSTON | | | |
| 305 | MEASLES VIRUS | ITDDPDVSIRLLEVV | 1188 | P04851.1 |
| | STRAIN | | | |
| | EDMONSTON | | | |
| 306 | MEASLES VIRUS | ITDDPDVSIRLLEVVQSDQS | 1189 | P04851.1 |
| | STRAIN | | | |
| | EDMONSTON | | | |
| 307 | BORDETELLA | ITTYV | 1190 | ACI16083.1 |
| | PERTUSSIS | | | |
| 308 | MEASLES VIRUS | IVEAGLASFILTIKF | 1191 | P04851.1 |
| | STRAIN | | | |
| | EDMONSTON | | | |
| 309 | MEASLES VIRUS | IVEAGLASFILTIKFGIETM | 1192 | P04851.1 |
| | STRAIN | | | |
| | EDMONSTON | | | |
| 310 | MEASLES VIRUS | IVEAGLASFILTIKFGIETMYPALG | 1193 | P04851.1 |
| | STRAIN | | | |
| | EDMONSTON | | | |
| 311 | RUBELLA VIRUS | KALEAQSRALRAELAA | 1194 | P07566.1 |
| 312 | MEASLES VIRUS | KARITHVDTESYFIV | 1195 | P69353.1 |
| | STRAIN | | | |
| | EDMONSTON | | | |
| 313 | RUBELLA VIRUS | KCGLHIRAGPYGHAT | 1196 | BAA28178.1 |
| 314 | MEASLES VIRUS | KCYTTGTIINQDPDK | 1197 | P69353.1 |
| | STRAIN | | | |
| | EDMONSTON | | | |
| 315 | MEASLES VIRUS | KDNPHPKGSR | 1198 | P08362.1 |
| | STRAIN | | | |
| | EDMONSTON | | | |
| 316 | MEASLES VIRUS | KDNRIPSYGVLSVDL | 1199 | P08362.1 |
| | STRAIN | | | |
| | EDMONSTON | | | |
| 317 | MEASLES | KFLNPDREYDFRDLT | 1200 | AAC35876.2 |
| | MORBILLIVIRUS | | | |
| 318 | RUBELLA VIRUS | KFVTAALLN | 1201 | BAA28178.1 |
| 319 | MEASLES VIRUS | KGNCSGPTTIR | 1202 | P08362.1 |
| | STRAIN | | | |
| | EDMONSTON | | | |
| 320 | MEASLES | KIKFLNPDREYDFRD | 1203 | P06830.1 |
| | MORBILLIVIRUS | | | |
| 321 | RUBELLA VIRUS | KIVDGGCFAPWDLEA | 1204 | BAA28178.1 |
| 322 | MEASLES VIRUS | KLGLKLLRYYTEILS | 1205 | P69353.1 |
| | STRAIN | | | |
| | EDMONSTON | | | |
| 323 | MEASLES VIRUS | KLGVWKSPTDMQSWV | 1206 | P08362.1 |
| | STRAIN | | | |
| | EDMONSTON | | | |
| 324 | BORDETELLA | KLKECPQ | 1207 | ACI16088.1 |
| | PERTUSSIS | | | |
| 325 | MEASLES | KLLRYYTEI | 1208 | P26031.1 |
| | MORBILLIVIRUS | | | |
| 326 | MEASLES VIRUS | KLMPFSGDFV | 1209 | ABK40531.1 |
| | STRAIN | | | |
| | EDMONSTON | | | |
| 327 | MEASLES | KLMPNITLL | 1210 | P26031.1 |
| | MORBILLIVIRUS | | | |
| 328 | MEASLES | KLRMETCFQQACKGKIQALCENPEW | 1211 | AAR89413.1 |
| | MORBILLIVIRUS | A | | |
| 329 | MEASLES | KLWCRHFCV | 1212 | P08362.1 |
| | MORBILLIVIRUS | | | |
| 330 | MEASLES VIRUS | KLWCRHFCVL | 1213 | P08362.1 |
| | STRAIN | | | |
| | EDMONSTON | | | |
| 331 | MEASLES | KLWESPQEI | 1214 | BAB60863.1 |
| | MORBILLIVIRUS | | | |
| 332 | MEASLES VIRUS | KMSSAVGFV | 1215 | ABO69699.1 |
| | STRAIN | | | |
| | EDMONSTON | | | |
| 333 | MEASLES VIRUS | KMSSAVGFVPDTGPASR | 1216 | P03422.1 |
| | STRAIN | | | |
| | EDMONSTON-B | | | |
| 334 | BORDETELLA | KMVYATN | 1217 | ACI16083.1 |
| | PERTUSSIS | | | |
| 335 | MEASLES VIRUS | KPDLTGTSKSYVRSL | 1218 | P69353.1 |
| | STRAIN | | | |
| | EDMONSTON | | | |
| 336 | MEASLES | KPNLSSKRSELSQLS | 1219 | P08362.1 |
| | MORBILLIVIRUS | | | |
| 337 | MEASLES VIRUS | KPNLSSKRSELSQLSMYRVF | 1220 | P08362.1 |
| | STRAIN | | | |
| | EDMONSTON | | | |
| 338 | MEASLES VIRUS | KQSRGEARESYRETG | 1221 | P04851.1 |
| | STRAIN | | | |
| | EDMONSTON | | | |
| 339 | MEASLES VIRUS | KQSRGEARESYRETGPSRAS | 1222 | P04851.1 |
| | STRAIN | | | |
| | EDMONSTON | | | |
| 340 | MEASLES VIRUS | KRFAGVVLAGAALGV | 1223 | P69353.1 |
| | STRAIN | | | |
| | EDMONSTON | | | |
| 341 | MEASLES VIRUS | KRTPGNKPRIAEMIC | 1224 | P04851.1 |
| | STRAIN | | | |
| | EDMONSTON | | | |
| 342 | MEASLES VIRUS | KRTPGNKPRIAEMICDIDTY | 1225 | P04851.1 |
| | STRAIN | | | |
| | EDMONSTON | | | |
| 343 | MEASLES | KSNHNNVYWLTIPPMKNLALGVINT | 1226 | AAR89413.1 |
| | MORBILLIVIRUS | L | | |
| 344 | MEASLES | KVSPYLFNV | 1227 | P08362.1 |
| | MORBILLIVIRUS | | | |
| 345 | BORDETELLA | KVVQLPKISKNALKANG | 1228 | ACI16083.1 |
| | PERTUSSIS | | | |
| 346 | BORDETELLA | KVVQLPKISKNALRNDG | 1229 | ACI16087.1 |
| | PERTUSSIS | | | |
| 347 | BORDETELLA | LAHRRIPPENIR | 1230 | P04977.1 |
| | PERTUSSIS | | | |
| 348 | BORDETELLA | LALALWAGFALS | 1231 | P11092.1 |
| | PERTUSSIS | | | |
| 349 | RUBELLA VIRUS | LAPGGGNCHLTVNGE | 1232 | BAA28178.1 |
| 350 | MEASLES VIRUS | LAQIWVLLAKAVTAP | 1233 | P04851.1 |
| | STRAIN | | | |
| | EDMONSTON | | | |
| 351 | MEASLES VIRUS | LAQIWVLLAKAVTAPDTAAD | 1234 | P04851.1 |
| | STRAIN | | | |
| | EDMONSTON | | | |
| 352 | RUBELLA VIRUS | LASYFNPGGSYYKQYHPTACEVEPAF | 1235 | BAA19893.1 |
| | | GHS | | |
| 353 | MEASLES | LAVSKGNCSGPTTIR | 1236 | P06830.1 |
| | MORBILLIVIRUS | | | |
| 354 | MEASLES VIRUS | LCENPEWAPLKDNRI | 1237 | P08362.1 |
| | STRAIN | | | |
| | EDMONSTON | | | |
| 355 | MEASLES | LDRLVRLIG | 1238 | ABI54110.1 |
| | MORBILLIVIRUS | | | |
| 356 | CORYNEBACTERI | LEEEGVTPL | 1239 | P33120.2 |
| | DIPHTHERIAEUM | | | |
| 357 | BORDETELLA | LEHRMQEAVEAERAGRGTGHFI | 1240 | CAD44970.1 |
| | PERTUSSIS | | | |
| 358 | MEASLES VIRUS | LEKLGYSGGDLLGIL | 1241 | P69353.1 |
| | STRAIN | | | |
| | EDMONSTON | | | |
| 359 | MEASLES VIRUS | LEQPVSNDLS | 1242 | P08362.1 |
| | STRAIN | | | |
| | EDMONSTON | | | |
| 360 | MEASLES VIRUS | LERKWLDVVRNIIAE | 1243 | P04851.1 |
| | STRAIN | | | |
| | EDMONSTON | | | |
| 361 | MEASLES VIRUS | LERKWLDVVRNIIAEDLSLR | 1244 | P04851.1 |
| | STRAIN | | | |
| | EDMONSTON | | | |
| 362 | MEASLES VIRUS | LFGPSLRDPISAEIS | 1245 | P69353.1 |
| | STRAIN | | | |
| | EDMONSTON | | | |
| 363 | MEASLES | LGELKLAALCHGEDS | 1246 | P06830.1 |
| | MORBILLIVIRUS | | | |
| 364 | MEASLES VIRUS | LGGKEDRRVKQSR | 1247 | P04851.1 |
| | STRAIN | | | |
| | EDMONSTON | | | |
| 365 | RUBELLA VIRUS | LGHDGHHGGTLRVGQHHRNASDVL | 1248 | ABD64214.1 |
| 366 | RUBELLA VIRUS | LGSPNCHGPDWASPVCQRHS | 1249 | P07566.1 |
| | STRAIN THERIEN | | | |
| 367 | RUBELLA VIRUS | LGSPNCHGPDWASPVCQRHSPDCSRL | 1250 | P07566.1 |
| | STRAIN THERIEN | V | | |
| 368 | RUBELLA VIRUS | LHDPDTEAPTEACVTSWL | 1251 | ABD64214.1 |
| 369 | MEASLES VIRUS | LIANCASILCKCYTT | 1252 | P69353.1 |
| | STRAIN | | | |
| | EDMONSTON | | | |
| 370 | MEASLES | LIGLLAIAGIRLHRAAIYTAEIHK | 1253 | AAR89413.1 |
| | MORBILLIVIRUS | | | |
| 371 | MEASLES VIRUS | LIPSMNQLSCDLIGQ | 1254 | P69353.1 |
| | STRAIN | | | |
| | EDMONSTON | | | |
| 372 | MEASLES VIRUS | LKIKIASGFGPLITH | 1255 | P08362.1 |
| | STRAIN | | | |
| | EDMONSTON | | | |
| 373 | MEASLES | LKIKIASGFGPLITHGSGMDLYK | 1256 | AAR89413.1 |
| | MORBILLIVIRUS | | | |
| 374 | BORDETELLA | LKLYFEP | 1257 | ACI16088.1 |
| | PERTUSSIS | | | |
| 375 | MEASLES VIRUS | LLAVLFVMFL | 1258 | P08362.1 |
| | STRAIN | | | |
| | EDMONSTON | | | |
| 376 | MEASLES VIRUS | LLDRLVRLIGNPDVS | 1259 | P04851.1 |
| | STRAIN | | | |
| | EDMONSTON | | | |
| 377 | MEASLES VIRUS | LLDRLVRLIGNPDVSGPKLT | 1260 | P04851.1 |
| | STRAIN | | | |
| | EDMONSTON | | | |
| 378 | MEASLES VIRUS | LLESSDQILRSMKGL | 1261 | P69353.1 |
| | STRAIN | | | |
| | EDMONSTON | | | |
| 379 | MEASLES | LLETRTTNQFLAVSK | 1262 | P06830.1 |
| | MORBILLIVIRUS | | | |
| 380 | MEASLES VIRUS | LLEVVQSDQSQSGLT | 1263 | P04851.1 |
| | STRAIN | | | |
| | EDMONSTON | | | |
| 381 | MEASLES VIRUS | LLEVVQSDQSQSGLTFASR | 1264 | P04851.1 |
| | STRAIN | | | |
| | EDMONSTON | | | |
| 382 | MEASLES VIRUS | LLEVVQSDQSQSGLTFASRG | 1265 | P04851.1 |
| | STRAIN | | | |
| | EDMONSTON | | | |
| 383 | MEASLES | LLGILESRGIKARIT | 1266 | AAL29688.1 |
| | MORBILLIVIRUS | | | |
| 384 | RUBELLA VIRUS | LLRTAPGP | 1267 | CAJ88851.1 |
| 385 | MEASLES VIRUS | LLRYYTEILSLFGPS | 1268 | P69353.1 |
| | STRAIN | | | |
| | EDMONSTON | | | |
| 386 | RUBELLA VIRUS | LLVPWVLIFMVCRRACRRRG | 1269 | P07566.1 |
| | STRAIN THERIEN | | | |
| 387 | MEASLES VIRUS | LLWRSRCKIV | 1270 | ABK40528.1 |
| | STRAIN | | | |
| | EDMONSTON | | | |
| 388 | MEASLES | LLWSYAMGV | 1271 | P04851.1 |
| | MORBILLIVIRUS | | | |
| 389 | MEASLES VIRUS | LLWSYAMGVGVELEN | 1272 | P04851.1 |
| | STRAIN | | | |
| | EDMONSTON | | | |
| 390 | MEASLES VIRUS | LLWSYAMGVGVELENSMGGL | 1273 | P04851.1 |
| | STRAIN | | | |
| | EDMONSTON | | | |
| 391 | MEASLES | LMIDRPYVL | 1274 | P08362.1 |
| | MORBILLIVIRUS | | | |
| 392 | MEASLES VIRUS | LNAMTQNIRPVQSVA | 1275 | P69353.1 |
| | STRAIN | | | |
| | EDMONSTON | | | |
| 393 | RUBELLA VIRUS | LNTPPPYQVSCGGES | 1276 | BAA28178.1 |
| 394 | MEASLES VIRUS | LRDPISAEISIQALS | 1277 | P69353.1 |
| | STRAIN | | | |
| | EDMONSTON | | | |
| 395 | BORDETELLA | LRGSGDLQEYLRHVTR | 1278 | AAA83981.1 |
| | PERTUSSIS | | | |
| 396 | RUBELLA VIRUS | LRLVDADD | 1279 | CAJ88851.1 |
| 397 | RUBELLA VIRUS | LRLVDADDPLLR | 1280 | BAA19893.1 |
| 398 | RUBELLA VIRUS | LRLVDADDPLLRTAPGPGEVWVTPVI | 1281 | BAA19893.1 |
| | GSQAR | | | |
| 399 | BORDETELLA | LRRLLYMIYMSGLAVRVHVSKEEQY | 1282 | P04979.1 |
| | PERTUSSIS | YDY | | |
| 400 | RUBELLA VIRUS | LRTAPGPG | 1283 | CAJ88851.1 |
| 401 | RUBELLA VIRUS | LRVGQHYRNASDVLPGHWLQ | 1284 | NP_740663.1 |
| 402 | BORDETELLA | LRYLA | 1285 | ACI16088.1 |
| | PERTUSSIS | | | |
| 403 | MEASLES VIRUS | LSCKPWQESRKNK | 1286 | P04851.1 |
| | STRAIN | | | |
| | EDMONSTON | | | |
| 404 | MEASLES | LSEIKGVIVHRLEGV | 1287 | AAL29688.1 |
| | MORBILLIVIRUS | | | |
| 405 | MEASLES VIRUS | LSIAYPTLSEIKGVI | 1288 | P69353.1 |
| | STRAIN | | | |
| | EDMONSTON | | | |
| 406 | MEASLES VIRUS | LSLLDLYLGRGYNVS | 1289 | P08362.1 |
| | STRAIN | | | |
| | EDMONSTON | | | |
| 407 | MEASLES VIRUS | LSQGNLIANCASILC | 1290 | P69353.1 |
| | STRAIN | | | |
| | EDMONSTON | | | |
| 408 | MEASLES | LSSHRGVIADNQAKW | 1291 | P06830.1 |
| | MORBILLIVIRUS | | | |
| 409 | MEASLES VIRUS | LSVDLSLTVELKIKI | 1292 | P08362.1 |
| | STRAIN | | | |
| | EDMONSTON | | | |
| 410 | BORDETELLA | LTGISICNPGSSLC | 1293 | AAA83981.1 |
| | PERTUSSIS | | | |
| 411 | MEASLES VIRUS | LTIKFGIETMYPALG | 1294 | P04851.1 |
| | STRAIN | | | |
| | EDMONSTON | | | |
| 412 | MEASLES VIRUS | LTIKFGIETMYPALGLHEFA | 1295 | P04851.1 |
| | STRAIN | | | |
| | EDMONSTON | | | |
| 413 | MEASLES VIRUS | LTLQTPTGQIHWGNL | 1296 | P69353.1 |
| | STRAIN | | | |
| | EDMONSTON | | | |
| 414 | RUBELLA VIRUS | LVDADDPL | 1297 | CAJ88851.1 |
| 415 | RUBELLA VIRUS | LVDADDPLLR | 1298 | BAA19893.1 |
| 416 | MEASLES VIRUS | LVEKPNLSSKRSELS | 1299 | P08362.1 |
| | STRAIN | | | |
| | EDMONSTON | | | |
| 417 | RUBELLA VIRUS | LVGATPE | 1300 | BAA19893.1 |
| 418 | RUBELLA VIRUS | LVGATPER | 1301 | CAJ88851.1 |
| 419 | MEASLES | LVKLGVWKSPTGMQS | 1302 | P06830.1 |
| | MORBILLIVIRUS | | | |
| 420 | MEASLES VIRUS | LVSGSFGNRFILSQGNLI | 1303 | P26031.1 |
| | STRAIN | | | |
| | EDMONSTON-B | | | |
| 421 | MEASLES VIRUS | LYKSNHNNVYWLTIP | 1304 | P08362.1 |
| | STRAIN | | | |
| | EDMONSTON | | | |
| 422 | MEASLES VIRUS | LYPMSPLLQECLRGSTKSCARTLVS | 1305 | P69353.1 |
| | STRAIN | | | |
| | EDMONSTON | | | |
| 423 | RUBELLA VIRUS | MASTTPITMEDLQKALEA | 1306 | P07566.1 |
| 424 | RUBELLA VIRUS | MASTTPITMEDLQKALEAQSR | 1307 | ABD64200.1 |
| 425 | RUBELLA VIRUS | MASTTPITMEDLQKALEAQSRALRA | 1308 | P07566.1 |
| | STRAIN THERIEN | ELAA | | |
| 426 | RUBELLA VIRUS | MASTTPITMEDLQKALEAQSRALRA | 1309 | ABD64200.1 |
| | GLAA | | | |
| 427 | RUBELLA VIRUS | MASTTPITMEDLQKALETQSRVLRAG | 1310 | CAA33016.1 |
| | VACCINE STRAIN | LTA | | |
| | RA27/3 | | | |
| 428 | MEASLES VIRUS | MATLLRSLALFKRNK | 1311 | P04851.1 |
| | STRAIN | | | |
| | EDMONSTON | | | |
| 429 | MEASLES VIRUS | MATLLRSLALFKRNKDKPPI | 1312 | P04851.1 |
| | STRAIN | | | |
| | EDMONSTON | | | |
| 430 | MEASLES | MDLYKSNHNNVYWLT | 1313 | P06830.1 |
| | MORBILLIVIRUS | | | |
| 431 | RUBELLA VIRUS | MEDLQKALEAQSRA | 1314 | P07566.1 |
| 432 | RUBELLA VIRUS | MEDLQKALEAQSRALRAELAA | 1315 | P07566.1 |
| 433 | MEASLES VIRUS | MGLKVNVSAIFMAVL | 1316 | P69353.1 |
| | STRAIN | | | |
| | EDMONSTON | | | |
| 434 | MEASLES | MIDRPYVLLAVLFVM | 1317 | P06830.1 |
| | MORBILLIVIRUS | | | |
| 435 | MEASLES VIRUS | MILAVQGVQDYINNE | 1318 | P69353.1 |
| | STRAIN | | | |
| | EDMONSTON | | | |
| 436 | MEASLES VIRUS | MLNSQAIDNLRASLE | 1319 | P69353.1 |
| | STRAIN | | | |
| | EDMONSTON | | | |
| 437 | MEASLES VIRUS | MNALVNSTLLETRTT | 1320 | P08362.1 |
| | STRAIN | | | |
| | EDMONSTON | | | |
| 438 | RUBELLA VIRUS | MNYTGNQQSRWGLGSPNCHGPDWA | 1321 | BAA19893.1 |
| | | SPVCQRHS | | |
| 439 | MEASLES VIRUS | MQSWVPLSTDDPVID | 1322 | P08362.1 |
| | STRAIN | | | |
| | EDMONSTON | | | |
| 440 | MEASLES | MSLSLLDLYLGRGYN | 1323 | P06830.1 |
| | MORBILLIVIRUS | | | |
| 441 | MEASLES VIRUS | MSPLLQECLRGSTKS | 1324 | P69353.1 |
| | STRAIN | | | |
| | EDMONSTON | | | |
| 442 | MEASLES | MSPQRDRINAFYKDN | 1325 | P06830.1 |
| | MORBILLIVIRUS | | | |
| 443 | MEASLES | MYRVFEVSVIRNPGL | 1326 | P06830.1 |
| | MORBILLIVIRUS | | | |
| 444 | MEASLES VIRUS | NALYPMSPLLQECLR | 1327 | P69353.1 |
| | STRAIN | | | |
| | EDMONSTON | | | |
| 445 | RUBELLA VIRUS | NCHGPDWASPVCQRHSPDCSRLVGA | 1328 | P07566.1 |
| | STRAIN THERIEN | T | | |
| 446 | MEASLES VIRUS | NFGRSYFDPAYFRLG | 1329 | P04851.1 |
| | STRAIN | | | |
| | EDMONSTON | | | |
| 447 | MEASLES VIRUS | NFGRSYFDPAYFRLGQEMVR | 1330 | P04851.1 |
| | STRAIN | | | |
| | EDMONSTON | | | |
| 448 | RUBELLA VIRUS | NGTQRACTFWAVNAY | 1331 | BAA28178.1 |
| 449 | MEASLES VIRUS | NGVTIQVGSRRYPDA | 1332 | P69353.1 |
| | STRAIN | | | |
| | EDMONSTON | | | |
| 450 | MEASLES VIRUS | NIIAEDLSLRRFMVA | 1333 | P04851.1 |
| | STRAIN | | | |
| | EDMONSTON | | | |
| 451 | MEASLES VIRUS | NIIAEDLSLRRFMVALILDI | 1334 | P04851.1 |
| | STRAIN | | | |
| | EDMONSTON | | | |
| 452 | MEASLES VIRUS | NITLLNNCTRVEIAE | 1335 | P69353.1 |
| | STRAIN | | | |
| | EDMONSTON | | | |
| 453 | MEASLES | NLALGVINTLEWIPR | 1336 | P06830.1 |
| | MORBILLIVIRUS | | | |
| 454 | CORYNEBACTERIUM | NLFQVVHWSYNRPAYSPG | 1337 | SRC280292 |
| | DIPHTHERIAE | | | |
| 455 | MEASLES VIRUS | NLVILPGQDLQYVLA | 1338 | P08362.1 |
| | STRAIN | | | |
| | EDMONSTON | | | |
| 456 | MEASLES VIRUS | NLYQQMGKPAPYMVN | 1339 | P04851.1 |
| | STRAIN | | | |
| | EDMONSTON | | | |
| 457 | MEASLES VIRUS | NLYQQMGKPAPYMVNLENSI | 1340 | P04851.1 |
| | STRAIN | | | |
| | EDMONSTON | | | |
| 458 | MEASLES VIRUS | NNCTRVEIAEYRRLL | 1341 | P69353.1 |
| | STRAIN | | | |
| | EDMONSTON | | | |
| 459 | MEASLES VIRUS | NPDREYDFRD | 1342 | P08362.1 |
| | STRAIN | | | |
| | EDMONSTON | | | |
| 460 | MEASLES VIRUS | NPDVSGPKL | 1343 | P10050.1 |
| | STRAIN HALLE | | | |
| 461 | MEASLES VIRUS | NPDVSGPKLTGALIG | 1344 | P04851.1 |
| | STRAIN | | | |
| | EDMONSTON | | | |
| 462 | MEASLES VIRUS | NPDVSGPKLTGALIGILSLF | 1345 | P04851.1 |
| | STRAIN | | | |
| | EDMONSTON | | | |
| 463 | MEASLES | NPPERIKLDYDQYCA | 1346 | P06830.1 |
| | MORBILLIVIRUS | | | |
| 464 | MEASLES | NQAKWAVPTTRTDDK | 1347 | P06830.1 |
| | MORBILLIVIRUS | | | |
| 465 | MEASLES | NQDPDKILTYIAADH | 1348 | AAF02706.1 |
| | MORBILLIVIRUS | | | |
| 466 | MEASLES VIRUS | NQLSCDLIGQKLGLK | 1349 | P69353.1 |
| | STRAIN | | | |
| | EDMONSTON | | | |
| 467 | RUBELLA VIRUS | NQQSRWGLGSPNCHGPDWASPVCQR | 1350 | ABD64214.1 |
| | | HS | | |
| 468 | MUMPS | NSTLGVKSAREF | 1351 | ABP48111.1 |
| | RUBULAVIRUS | | | |
| 469 | RUBELLA VIRUS | NTPHGQLEVQVPPDP | 1352 | BAA28178.1 |
| 470 | MEASLES VIRUS | NVSAIFMAVLLTLQT | 1353 | P69353.1 |
| | STRAIN | | | |
| | EDMONSTON | | | |
| 471 | MEASLES | PAEVDGDVKLSSNLV | 1354 | P06830.1 |
| | MORBILLIVIRUS | | | |
| 472 | RUBELLA VIRUS | PAFGHSDAACWGFPT | 1355 | BAA28178.1 |
| 473 | MEASLES VIRUS | PALICCCRGRCNKKG | 1356 | P69353.1 |
| | STRAIN | | | |
| | EDMONSTON | | | |
| 474 | MEASLES | PDKILTYIAADHC | 1357 | AAF02706.1 |
| | MORBILLIVIRUS | | | |
| 475 | MEASLES VIRUS | PERIKLDYDQYCADV | 1358 | P08362.1 |
| | STRAIN | | | |
| | EDMONSTON | | | |
| 476 | RUBELLA VIRUS | PERPRLRL | 1359 | CAJ88851.1 |
| 477 | RUBELLA VIRUS | PGCATQAPVPVRLAG | 1360 | BAA28178.1 |
| 478 | RUBELLA VIRUS | PGCATQAPVPVRLAGVRFESKIVDGG | 1361 | CAJ88851.1 |
| | VACCINE STRAIN | CFA | | |
| | RA27/3 | | | |
| 479 | RUBELLA VIRUS | PGEVWVTP | 1362 | CAJ88851.1 |
| 480 | RUBELLA VIRUS | PGEVWVTPVIGSQAR | 1363 | BAA28178.1 |
| 481 | CORYNEBACTERIUM | PGKLDVNKSKTHISVN | 1364 | CAE11230.1 |
| | DIPHTHERIAE | | | |
| 482 | MEASLES VIRUS | PGLGAPVFHMTNYLE | 1365 | P08362.1 |
| | STRAIN | | | |
| | EDMONSTON | | | |
| 483 | RUBELLA VIRUS | PGPGEVWV | 1366 | CAJ88851.1 |
| 484 | RUBELLA VIRUS | PHKTVRVKFHTETRT | 1367 | BAA28178.1 |
| 485 | MEASLES | PIELQVECFTWDQKL | 1368 | AAR89413.1 |
| | MORBILLIVIRUS | | | |
| 486 | MEASLES VIRUS | PISLERLDVG | 1369 | P26031.1 |
| | STRAIN | | | |
| | EDMONSTON-B | | | |
| 487 | MEASLES VIRUS | PISLERLDVGTNLGN | 1370 | P69353.1 |
| | STRAIN | | | |
| | EDMONSTON | | | |
| 488 | BORDETELLA | PKALFTQQGGAYGRC | 1371 | P04979.1 |
| | PERTUSSIS | | | |
| 489 | MEASLES VIRUS | PKYVATQGYLISNFD | 1372 | P69353.1 |
| | STRAIN | | | |
| | EDMONSTON | | | |
| 490 | MEASLES VIRUS | PLDIDTASESSQD | 1373 | P04851.1 |
| | STRAIN | | | |
| | EDMONSTON | | | |
| 491 | RUBELLA VIRUS | PLGLKFKTVRPVALP | 1374 | BAA28178.1 |
| 492 | MEASLES VIRUS | PLITHGSGMDLYKSN | 1375 | P08362.1 |
| | STRAIN | | | |
| | EDMONSTON | | | |
| 493 | MEASLES | PLKDNRIPSYGVLSV | 1376 | P06830.1 |
| | MORBILLIVIRUS | | | |
| 494 | RUBELLA VIRUS | PLLRTAPG | 1377 | CAJ88851.1 |
| 495 | MEASLES VIRUS | PLLSCKPWQESRK | 1378 | P04851.1 |
| | STRAIN | | | |
| | EDMONSTON | | | |
| 496 | BORDETELLA | PPATVYRYDSRPPE | 1379 | P04977.1 |
| | PERTUSSIS | | | |
| 497 | MEASLES | PPISLERLDVGT | 1380 | AAL29688.1 |
| | MORBILLIVIRUS | | | |
| 498 | RUBELLA VIRUS | PPPPEERQETRSQTPAPKPS | 1381 | P07566.1 |
| 499 | BORDETELLA | PQEQITQHGSPYGRC | 1382 | AAA83981.1 |
| | PERTUSSIS | | | |
| 500 | BORDETELLA | PQEQITQHGSPYGRCANK | 1383 | AAA83981.1 |
| | PERTUSSIS | | | |
| 501 | BORDETELLA | PQPGPQPPQPPQPQPEAPAPQPPAG | 1384 | P14283.3 |
| | PERTUSSIS | | | |
| 502 | MEASLES VIRUS | PRLGGKEDRRVKQ | 1385 | P04851.1 |
| | STRAIN | | | |
| | EDMONSTON | | | |
| 503 | RUBELLA VIRUS | PRLRLVDA | 1386 | CAJ88851.1 |
| 504 | RUBELLA VIRUS | PRNVRVTGCYQCGTP | 1387 | BAA28178.1 |
| 505 | MEASLES VIRUS | PSRASDARAAHLP | 1388 | P04851.1 |
| | STRAIN | | | |
| | EDMONSTON | | | |
| 506 | MEASLES VIRUS | PTGQIHWGNLSKIGV | 1389 | P69353.1 |
| | STRAIN | | | |
| | EDMONSTON | | | |
| 507 | MEASLES VIRUS | PTGTPLDIDTASE | 1390 | P04851.1 |
| | STRAIN | | | |
| | EDMONSTON | | | |
| 508 | MEASLES VIRUS | PTLSEIKGVIVHRLE | 1391 | P69353.1 |
| | STRAIN | | | |
| | EDMONSTON | | | |
| 509 | MEASLES | PTTIRGQFSNMSLSL | 1392 | P06830.1 |
| | MORBILLIVIRUS | | | |
| 510 | MEASLES | PTTRTDDKLR | 1393 | AAR89413.1 |
| | MORBILLIVIRUS | | | |
| 511 | MEASLES | PTTRTDDKLRMETCFQQACKG | 1394 | AAR89413.1 |
| | MORBILLIVIRUS | | | |
| 512 | RUBELLA VIRUS | PVALPRTLAPPRNVR | 1395 | BAA28178.1 |
| 513 | CORYNEBACTERIUM | PVFAGANYAAWAVNVAQVI | 1396 | AAV70486.1 |
| | DIPHTHERIAE | | | |
| 514 | RUBELLA VIRUS | PVIGSQAR | 1397 | CAJ88851.1 |
| 515 | MEASLES | PVVEVNGVTIQVGSR | 1398 | AAL29688.1 |
| | MORBILLIVIRUS | | | |
| 516 | RUBELLA VIRUS | PWELVVLTARPEDGWTCRGV | 1399 | P07566.1 |
| | STRAIN THERIEN | | | |
| 517 | MEASLES VIRUS | PWQESRKNKAQTR | 1400 | P04851.1 |
| | STRAIN | | | |
| | EDMONSTON | | | |
| 518 | MEASLES VIRUS | PYMVNLENSIQNKFS | 1401 | P04851.1 |
| | STRAIN | | | |
| | EDMONSTON | | | |
| 519 | MEASLES VIRUS | PYMVNLENSIQNKFSAGSYP | 1402 | P04851.1 |
| | STRAIN | | | |
| | EDMONSTON | | | |
| 520 | MEASLES VIRUS | PYQGSGKGVS | 1403 | P08362.1 |
| | STRAIN | | | |
| | EDMONSTON | | | |
| 521 | RUBELLA VIRUS | PYQVSCGGESDRASA | 1404 | BAA28178.1 |
| 522 | MEASLES | QACKGKIQALCEN | 1405 | P08362.1 |
| | MORBILLIVIRUS | | | |
| 523 | MEASLES VIRUS | QAGQEMILAVQGVQD | 1406 | P69353.1 |
| | STRAIN | | | |
| | EDMONSTON | | | |
| 524 | MEASLES | QALCENPECVPLKDN | 1407 | P06830.1 |
| | MORBILLIVIRUS | | | |
| 525 | BORDETELLA | QALGALK | 1408 | ACI16088.1 |
| | PERTUSSIS | | | |
| 526 | RUBELLA VIRUS | QAPVPVRLAGVRFES | 1409 | BAA28178.1 |
| 527 | RUBELLA VIRUS | QCGTPALVEGLAPGG | 1410 | BAA28178.1 |
| 528 | MEASLES VIRUS | QDPDKILTYIAADHC | 1411 | P69353.1 |
| | STRAIN | | | |
| | EDMONSTON | | | |
| 529 | MEASLES VIRUS | QECLRGSTKSCARTL | 1412 | P69353.1 |
| | STRAIN | | | |
| | EDMONSTON | | | |
| 530 | BORDETELLA | QEQITQHGSPYGRC | 1413 | AAA83981.1 |
| | PERTUSSIS | | | |
| 531 | MEASLES VIRUS | QESRKNKAQTRTP | 1414 | P04851.1 |
| | STRAIN | | | |
| | EDMONSTON | | | |
| 532 | MEASLES VIRUS | QGDQSENELPRLGGK | 1415 | P04851.1 |
| | STRAIN | | | |
| | EDMONSTON | | | |
| 533 | MEASLES VIRUS | QGDQSENELPRLGGKEDRRV | 1416 | P04851.1 |
| | STRAIN | | | |
| | EDMONSTON | | | |
| 534 | CORYNEBACTERIUM | QGESGHDIKITAENTPLPIA | 1417 | AAV70486.1 |
| | DIPHTHERIAE | | | |
| 535 | MEASLES | QGSGKGVSFQLVKLG | 1418 | P06830.1 |
| | MORBILLIVIRUS | | | |
| 536 | MEASLES VIRUS | QGVQDYINNELIPSM | 1419 | P69353.1 |
| | STRAIN | | | |
| | EDMONSTON | | | |
| 537 | RUBELLA VIRUS | QLEVQVPPDPGDLVE | 1420 | BAA28178.1 |
| 538 | MEASLES | QLPEATFMV | 1421 | ABK40528.1 |
| | MORBILLIVIRUS | | | |
| 539 | RUBELLA VIRUS | QLPFLGHDGHHGGTLRVGQHYRNAS | 1422 | NP_740663.1 |
| 540 | MEASLES VIRUS | QLSMYRVFEV | 1423 | P08362.1 |
| | STRAIN | | | |
| | EDMONSTON | | | |
| 541 | BORDETELLA | QLSNIT | 1424 | ACI16083.1 |
| | PERTUSSIS | | | |
| 542 | MEASLES VIRUS | QNIRPVQSVASSRRH | 1425 | P69353.1 |
| | STRAIN | | | |
| | EDMONSTON | | | |
| 543 | MEASLES VIRUS | QNKFSAGSYPLLWSY | 1426 | P04851.1 |
| | STRAIN | | | |
| | EDMONSTON | | | |
| 544 | MEASLES VIRUS | QNKFSAGSYPLLWSYAMGVG | 1427 | P04851.1 |
| | STRAIN | | | |
| | EDMONSTON | | | |
| 545 | MEASLES VIRUS | QNKFSAGSYPLLWSYAMGVGVELEN | 1428 | P04851.1 |
| | STRAIN | | | |
| | EDMONSTON | | | |
| 546 | MEASLES VIRUS | QQACKGKIQALCENP | 1429 | P08362.1 |
| | STRAIN | | | |
| | EDMONSTON | | | |
| 547 | MEASLES VIRUS | QQRRVVGEFRLERKW | 1430 | P04851.1 |
| | STRAIN | | | |
| | EDMONSTON | | | |
| 548 | MEASLES VIRUS | QQRRVVGEFRLERKWLDVVR | 1431 | P04851.1 |
| | STRAIN | | | |
| | EDMONSTON | | | |
| 549 | BORDETELLA | QQTRANPNPYTSRRSVAS | 1432 | P04977.1 |
| | PERTUSSIS | | | |
| 550 | RUBELLA VIRUS | QRHSPDCSRLVGATP | 1433 | BAA28178.1 |
| 551 | MEASLES VIRUS | QSGLTFASRGTNMED | 1434 | P04851.1 |
| | STRAIN | | | |
| | EDMONSTON | | | |
| 552 | MEASLES VIRUS | QSGLTFASRGTNMEDEADQY | 1435 | P04851.1 |
| | STRAIN | | | |
| | EDMONSTON | | | |
| 553 | CORYNEBACTERIUM | QSIALSSLMVAQAIPLVGEL | 1436 | AAV70486.1 |
| | DIPHTHERIAE | | | |
| 554 | MEASLES VIRUS | QSRFGWFENKEISDI | 1437 | P04851.1 |
| | STRAIN | | | |
| | EDMONSTON | | | |
| 555 | MEASLES VIRUS | QSRFGWFENKEISDIEVQDP | 1438 | P04851.1 |
| | STRAIN | | | |
| | EDMONSTON | | | |
| 556 | MEASLES VIRUS | QSRGEAR | 1439 | P04851.1 |
| | STRAIN | | | |
| | EDMONSTON | | | |
| 557 | MEASLES VIRUS | QSRGEARESYRETGPSRA | 1440 | P04851.1 |
| | STRAIN | | | |
| | EDMONSTON | | | |
| 558 | RUBELLA VIRUS | QTGRGGSAPRPELGPPTN | 1441 | P07566.1 |
| | STRAIN THERIEN | | | |
| 559 | RUBELLA VIRUS | QTPAPKPSRAPPQQPQPPRMQTGRG | 1442 | P07566.1 |
| | STRAIN THERIEN | | | |
| 560 | MEASLES VIRUS | QVGSRRYPDAVYLHR | 1443 | P69353.1 |
| | STRAIN | | | |
| | EDMONSTON | | | |
| 561 | MEASLES VIRUS | QVSFLQGDQSENE | 1444 | P04851.1 |
| | STRAIN | | | |
| | EDMONSTON | | | |
| 562 | RUBELLA VIRUS | QYHPTACEVEPAFGH | 1445 | BAA28178.1 |
| 563 | MEASLES VIRUS | QYVLATYDTSRVEHA | 1446 | P08362.1 |
| | STRAIN | | | |
| | EDMONSTON | | | |
| 564 | BORDETELLA | RANPNPYTSRRSV | 1447 | ACI04548.1 |
| | PERTUSSIS | | | |
| 565 | MEASLES VIRUS | RASDARAAHLPTG | 1448 | P04851.1 |
| 566 | MEASLES VIRUS | RASLETTNQAIEAIR | 1449 | P69353.1 |
| | STRAIN | | | |
| | EDMONSTON | | | |
| 567 | RUBELLA VIRUS | RCGRLICGLSTTAQYPPTRF | 1450 | P07566.1 |
| | STRAIN THERIEN | | | |
| 568 | BORDETELLA | RDGQSVIGACASPYEGRYR | 1451 | P04979.1 |
| | PERTUSSIS | | | |
| 569 | MEASLES VIRUS | RESYRETGPSRAS | 1452 | P04851.1 |
| | STRAIN | | | |
| | EDMONSTON | | | |
| 570 | MEASLES VIRUS | RETGPSRASDARA | 1453 | P04851.1 |
| | STRAIN | | | |
| | EDMONSTON | | | |
| 571 | MUMPS | RFAKYQQQGRLEAR | 1454 | P21186.1 |
| | RUBULAVIRUS | | | |
| 572 | RUBELLA VIRUS | RFGAPQAFLAGLLLATVAVGTARA | 1455 | P07566.1 |
| | STRAIN THERIEN | | | |
| 573 | MEASLES VIRUS | RFMVALILDIKRTPG | 1456 | P04851.1 |
| | STRAIN | | | |
| | EDMONSTON | | | |
| 574 | MEASLES VIRUS | RFMVALILDIKRTPGNKPRI | 1457 | P04851.1 |
| | STRAIN | | | |
| | EDMONSTON | | | |
| 575 | MEASLES VIRUS | RGEARESYRETGP | 1458 | P04851.1 |
| | STRAIN | | | |
| | EDMONSTON | | | |
| 576 | RUBELLA VIRUS | RGTTPPAYG | 1459 | CAA28880.1 |
| 577 | RUBELLA VIRUS | RIETRSARH | 1460 | ABD64214.1 |
| | STRAIN M33 | | | |
| 578 | BORDETELLA | RILAGALATYQ | 1461 | P04977.1 |
| | PERTUSSIS | | | |
| 579 | BORDETELLA | RIPPENIRRVT | 1462 | ACI04548.1 |
| | PERTUSSIS | | | |
| 580 | BORDETELLA | RISNLND | 1463 | ACI16083.1 |
| | PERTUSSIS | | | |
| 581 | BORDETELLA | RLANLNG | 1464 | ACI16088.1 |
| | PERTUSSIS | | | |
| 582 | MEASLES VIRUS | RLDVGTNLGNAIAKL | 1465 | P69353.1 |
| | STRAIN | | | |
| | EDMONSTON | | | |
| 583 | MEASLES VIRUS | RLERKWLDV | 1466 | P04851.1 |
| | STRAIN | | | |
| | EDMONSTON | | | |
| 584 | MEASLES VIRUS | RLGGKEDRRVKQSRG | 1467 | P04851.1 |
| | STRAIN | | | |
| | EDMONSTON | | | |
| 585 | MEASLES VIRUS | RLGGKEDRRVKQSRGEARES | 1468 | P04851.1 |
| | STRAIN | | | |
| | EDMONSTON | | | |
| 586 | MEASLES VIRUS | RLLDRLVRL | 1469 | ABI54110.1 |
| | STRAIN | | | |
| | EDMONSTON | | | |
| 587 | RUBELLA VIRUS | RLRLVDAD | 1470 | CAJ88851.1 |
| 588 | RUBELLA VIRUS | RLRLVDADDPLLR | 1471 | BAA19893.1 |
| 589 | RUBELLA VIRUS | RLRLVDADDPLLRTAPGPGEVWVTP | 1472 | BAA19893.1 |
| | VIGSQA | | | |
| 590 | RUBELLA VIRUS | RLRLVQDADDPLLRIAPGPGEVWVTP | 1473 | SRC265968 |
| | VIGSQA | | | |
| 591 | MEASLES VIRUS | RLSDNGYYTV | 1474 | ABK40528.1 |
| | STRAIN | | | |
| | EDMONSTON | | | |
| 592 | RUBELLA VIRUS | RLVDADDP | 1475 | CAJ88851.1 |
| 593 | RUBELLA VIRUS | RLVDADDPLLRTAPG | 1476 | BAA28178.1 |
| 594 | RUBELLA VIRUS | RLVGATPE | 1477 | CAJ88851.1 |
| 595 | RUBELLA VIRUS | RMQTGRGGSAPRPELGPPTNPFQAAV | 1478 | ABD64216.1 |
| | | A | | |
| 596 | MEASLES | RMSKGVFKV | 1479 | ABY21184.1 |
| | MORBILLIVIRUS | | | |
| 597 | MEASLES | RNPGLGAPVFHMTNY | 1480 | P06830.1 |
| | MORBILLIVIRUS | | | |
| 598 | RUBELLA VIRUS | RPRLRLVD | 1481 | CAJ88851.1 |
| 599 | BORDETELLA | RQAESSEAMAAWSERAGEA | 1482 | P04977.1 |
| | PERTUSSIS | | | |
| 600 | RUBELLA VIRUS | RQTWAEWAAAHWWQL | 1483 | BAA28178.1 |
| 601 | MEASLES VIRUS | RRVKQSRGEARES | 1484 | P04851.1 |
| | STRAIN | | | |
| | EDMONSTON | | | |
| 602 | MEASLES | RRYPDAVYL | 1485 | ACA09725.1 |
| | MORBILLIVIRUS | | | |
| 603 | MEASLES VIRUS | RRYPDAVYLHRIDLG | 1486 | P69353.1 |
| | STRAIN | | | |
| | EDMONSTON | | | |
| 604 | MEASLES VIRUS | RSAGKVSSTLASELG | 1487 | P04851.1 |
| | STRAIN | | | |
| | EDMONSTON | | | |
| 605 | MEASLES VIRUS | RSAGKVSSTLASELGITAED | 1488 | P04851.1 |
| | STRAIN | | | |
| | EDMONSTON | | | |
| 606 | MEASLES VIRUS | RSELSQLS | 1489 | P08362.1 |
| | STRAIN | | | |
| | EDMONSTON | | | |
| 607 | MEASLES VIRUS | RSELSQLSMYRVFEV | 1490 | P08362.1 |
| | STRAIN | | | |
| | EDMONSTON | | | |
| 608 | RUBELLA VIRUS | RSQTPAPKPSRAPPQQPQPPRMQT | 1491 | ABD64214.1 |
| 609 | RUBELLA VIRUS | RTAPGPGE | 1492 | CAJ88851.1 |
| 610 | RUBELLA VIRUS | RTAPGPGEVWVTPVI | 1493 | BAA28178.1 |
| 611 | MEASLES | RTDDKLRMETCFQQA | 1494 | P06830.1 |
| | MORBILLIVIRUS | | | |
| 612 | RUBELLA VIRUS | RTLAPPRNVRVTGCY | 1495 | BAA28178.1 |
| 613 | MEASLES VIRUS | RTVLEPIRDALNAMT | 1496 | P69353.1 |
| | STRAIN | | | |
| | EDMONSTON | | | |
| 614 | MEASLES VIRUS | RVEHAVVYYVYSPSR | 1497 | P08362.1 |
| | STRAIN | | | |
| | EDMONSTON | | | |
| 615 | MEASLES VIRUS | RVFEVGVIRNPGLGA | 1498 | P08362.1 |
| | STRAIN | | | |
| | EDMONSTON | | | |
| 616 | BORDETELLA | RVHVSKEEQYYDYEDATFE | 1499 | P04978.2 |
| | PERTUSSIS | | | |
| 617 | RUBELLA VIRUS | RVIDPAAQ | 1500 | BAA28178.1 |
| 618 | RUBELLA VIRUS | RVKFHTETRTVWQLS | 1501 | BAA28178.1 |
| 619 | BORDETELLA | RVYHNGITGET | 1502 | ACI04548.1 |
| | PERTUSSIS | | | |
| 620 | BORDETELLA | RYDSRPPEDVF | 1503 | ACI04548.1 |
| | PERTUSSIS | | | |
| 621 | MEASLES VIRUS | RYPDAVYLHRIDLGP | 1504 | P69353.1 |
| | STRAIN | | | |
| | EDMONSTON | | | |
| 622 | MEASLES VIRUS | SAEISIQALSYALGG | 1505 | P69353.1 |
| | STRAIN | | | |
| | EDMONSTON | | | |
| 623 | MEASLES VIRUS | SAEPLLSCKPWQESR | 1506 | P04851.1 |
| | STRAIN | | | |
| | EDMONSTON | | | |
| 624 | MEASLES VIRUS | SAEPLLSCKPWQESRKNKAQ | 1507 | P04851.1 |
| | STRAIN | | | |
| | EDMONSTON | | | |
| 625 | MEASLES | SAGKVSSTLASELG | 1508 | P04851.1 |
| | MORBILLIVIRUS | | | |
| 626 | MEASLES VIRUS | SAGKVSSTLASELGITAEDARLVS | 1509 | P04851.1 |
| | STRAIN | | | |
| | EDMONSTON | | | |
| 627 | MEASLES VIRUS | SCTVTREDGT | 1510 | P08362.1 |
| | STRAIN | | | |
| | EDMONSTON | | | |
| 628 | RUBELLA VIRUS | SDAACWGFPTDTVMS | 1511 | BAA28178.1 |
| 629 | MEASLES VIRUS | SDARAAHLPTGTP | 1512 | P04851.1 |
| | STRAIN | | | |
| | EDMONSTON | | | |
| 630 | RUBELLA VIRUS | SDWHQGTHVCHTKHMDFWCVEHD | 1513 | P07566.1 |
| | STRAIN THERIEN | | | |
| 631 | MEASLES VIRUS | SELRRWIKYTQQRRV | 1514 | P04851.1 |
| | STRAIN | | | |
| | EDMONSTON | | | |
| 632 | MEASLES VIRUS | SELRRWIKYTQQRRVVGEFR | 1515 | P04851.1 |
| | STRAIN | | | |
| | EDMONSTON | | | |
| 633 | MEASLES VIRUS | SELSQL | 1516 | P08362.1 |
| | STRAIN | | | |
| | EDMONSTON | | | |
| 634 | MEASLES VIRUS | SELSQLS | 1517 | P08362.1 |
| | STRAIN | | | |
| | EDMONSTON | | | |
| 635 | BORDETELLA | SEYLAHRRIPPENIRRVTRV | 1518 | CAD44970.1 |
| | PERTUSSIS | | | |
| 636 | MEASLES VIRUS | SFLQGDQSENELP | 1519 | P04851.1 |
| | STRAIN | | | |
| | EDMONSTON | | | |
| 637 | MEASLES VIRUS | SGKGVSFQLVKLGVW | 1520 | P08362.1 |
| | STRAIN | | | |
| | EDMONSTON | | | |
| 638 | MEASLES VIRUS | SHRGVIADNQAKWAV | 1521 | P08362.1 |
| | STRAIN | | | |
| | EDMONSTON | | | |
| 639 | MEASLES VIRUS | SIEHQVKDVLTPLFK | 1522 | P08362.1 |
| | STRAIN | | | |
| | EDMONSTON | | | |
| 640 | MEASLES VIRUS | SKIGVVGIGSASYKV | 1523 | P69353.1 |
| | STRAIN | | | |
| | EDMONSTON | | | |
| 641 | MEASLES | SKRSELSQLSMYRVF | 1524 | P06830.1 |
| | MORBILLIVIRUS | | | |
| 642 | MEASLES | SLFVESPGQLIQRITDDPDVS | 1525 | ABI54110.1 |
| | MORBILLIVIRUS | | | |
| 643 | MEASLES VIRUS | SLSTNLDVTNSIEHQ | 1526 | P08362.1 |
| | STRAIN | | | |
| | EDMONSTON | | | |
| 644 | MEASLES VIRUS | SLSTNLDVTNSIEHQVKDVLTPLFK | 1527 | P08362.1 |
| | STRAIN | | | |
| | EDMONSTON | | | |
| 645 | MEASLES VIRUS | SLWGSGLLML | 1528 | BAE98296.1 |
| | STRAIN | | | |
| | EDMONSTON | | | |
| 646 | MEASLES VIRUS | SMKGLSSTSIVYILI | 1529 | P69353.1 |
| | STRAIN | | | |
| | EDMONSTON | | | |
| 647 | MEASLES | SMYRVFEVGV | 1530 | P08362.1 |
| | MORBILLIVIRUS | | | |
| 648 | MEASLES | SNDLSNCMVALGELK | 1531 | P06830.1 |
| | MORBILLIVIRUS | | | |
| 649 | MEASLES VIRUS | SPGQLIQR | 1532 | P10050.1 |
| | STRAIN HALLE | | | |
| 650 | MEASLES VIRUS | SQDPQDSRRSAEP | 1533 | P04851.1 |
| | STRAIN | | | |
| | EDMONSTON | | | |
| 651 | MEASLES | SRIVINREHLMIDRP | 1534 | P06830.1 |
| | MORBILLIVIRUS | | | |
| 652 | MEASLES VIRUS | SRKNKAQTRTPLQ | 1535 | P04851.1 |
| | STRAIN | | | |
| | EDMONSTON | | | |
| 653 | RUBELLA VIRUS | SRLVGATP | 1536 | CAJ88851.1 |
| 654 | RUBELLA VIRUS | SRLVGATPERPRLRLVDADDPLLR | 1537 | CAJ88851.1 |
| 655 | MEASLES VIRUS | SRPGLKPDLTGTSKS | 1538 | P69353.1 |
| | STRAIN | | | |
| | EDMONSTON | | | |
| 656 | BORDETELLA | SRRSVASIVGTLVRM | 1539 | CAD44970.1 |
| | PERTUSSIS | | | |
| 657 | RUBELLA VIRUS | SRWGLGSPNCHGPDW | 1540 | BAA28178.1 |
| 658 | BORDETELLA | SSATK | 1541 | ACI16088.1 |
| | PERTUSSIS | | | |
| 659 | RUBELLA VIRUS | SSGGYAQLASYFNPG | 1542 | BAA28178.1 |
| 660 | BORDETELLA | SSLGNGV | 1543 | ACI16083.1 |
| | PERTUSSIS | | | |
| 661 | MEASLES | SSNLVILPGQDLQYV | 1544 | P06830.1 |
| | MORBILLIVIRUS | | | |
| 662 | MEASLES VIRUS | SSQDPQDSRRSAEPL | 1545 | P04851.1 |
| | STRAIN | | | |
| | EDMONSTON | | | |
| 663 | MEASLES VIRUS | SSQDPQDSRRSAEPLLSCKP | 1546 | P04851.1 |
| | STRAIN | | | |
| | EDMONSTON | | | |
| 664 | MEASLES VIRUS | SSRRHKRFAGVVLAG | 1547 | P69353.1 |
| | STRAIN | | | |
| | EDMONSTON | | | |
| 665 | MEASLES VIRUS | SSTSIVYILIAVCLG | 1548 | P69353.1 |
| | STRAIN | | | |
| | EDMONSTON | | | |
| 666 | BORDETELLA | STPGIVI | 1549 | AAA83981.1 |
| | PERTUSSIS | | | |
| 667 | BORDETELLA | STPGIVIPPQEQITQHGSPYGRC | 1550 | AAA83981.1 |
| | PERTUSSIS | | | |
| 668 | BORDETELLA | STSSSRRYTEVY | 1551 | P04977.1 |
| | PERTUSSIS | | | |
| 669 | MEASLES VIRUS | SYFIVLSIAYPTLSE | 1552 | P69353.1 |
| | STRAIN | | | |
| | EDMONSTON | | | |
| 670 | MEASLES VIRUS | SYRETGPSRASDA | 1553 | P04851.1 |
| | STRAIN | | | |
| | EDMONSTON | | | |
| 671 | BORDETELLA | SYVK | 1554 | ACI16083.1 |
| | PERTUSSIS | | | |
| 672 | RUBELLA VIRUS | SYVQHPHKTVRVKFH | 1555 | BAA28178.1 |
| 673 | RUBELLA VIRUS | TAPGPGEV | 1556 | CAJ88851.1 |
| 674 | BORDETELLA | TATRLLSSTNSRLC | 1557 | AAA83981.1 |
| | PERTUSSIS | | | |
| 675 | MEASLES | TDDPVIDRLYLSSHR | 1558 | P06830.1 |
| | MORBILLIVIRUS | | | |
| 676 | MEASLES VIRUS | TEILSLFGPSLRDPI | 1559 | P69353.1 |
| | STRAIN | | | |
| | EDMONSTON | | | |
| 677 | RUBELLA VIRUS | TETRTVWQLSVAGVS | 1560 | BAA28178.1 |
| 678 | BORDETELLA | TEVYLEHRMQEAVE | 1561 | P04977.1 |
| | PERTUSSIS | | | |
| 679 | MEASLES VIRUS | TFMPEGTVCSQNALY | 1562 | P69353.1 |
| | STRAIN | | | |
| | EDMONSTON | | | |
| 680 | RUBELLA VIRUS | TGACICEIPTDVSCE | 1563 | BAA28178.1 |
| 681 | BORDETELLA | TGDLRAY | 1564 | ACI16083.1 |
| | PERTUSSIS | | | |
| 682 | MEASLES | TGMQSWVPLSTDDPV | 1565 | P06830.1 |
| | MORBILLIVIRUS | | | |
| 683 | RUBELLA VIRUS | TGNQQSRWGLGSPNC | 1566 | BAA28178.1 |
| 684 | MEASLES VIRUS | TGPSRASDARAAH | 1567 | P04851.1 |
| | STRAIN | | | |
| | EDMONSTON | | | |
| 685 | MEASLES | TGTIINQDPDKILTY | 1568 | AAF02706.1 |
| | MORBILLIVIRUS | | | |
| 686 | RUBELLA VIRUS | TGVVYGTHTTAVSET | 1569 | BAA28178.1 |
| 687 | MEASLES VIRUS | TIRGQFSNMSLSLLD | 1570 | P08362.1 |
| | STRAIN | | | |
| | EDMONSTON | | | |
| 688 | RUBELLA VIRUS | TLGATCALPLAGLLA | 1571 | BAA28178.1 |
| 689 | MEASLES | TLLNNCTRV | 1572 | P26031.1 |
| | MORBILLIVIRUS | | | |
| 690 | MEASLES VIRUS | TLNVPPPPDPGR | 1573 | P03422.1 |
| | STRAIN | | | |
| | EDMONSTON-B | | | |
| 691 | MEASLES VIRUS | TLNVPPPPDPGRASTSGTPIKK | 1574 | P03422.1 |
| | STRAIN | | | |
| | EDMONSTON-B | | | |
| 692 | MEASLES | TMTSQGMYGGTYPVE | 1575 | P06830.1 |
| | MORBILLIVIRUS | | | |
| 693 | MEASLES VIRUS | TNLGNAIAKLEDAKE | 1576 | P69353.1 |
| | STRAIN | | | |
| | EDMONSTON | | | |
| 694 | MEASLES VIRUS | TNMEDEADQYFSHDD | 1577 | P04851.1 |
| | STRAIN | | | |
| | EDMONSTON | | | |
| 695 | MEASLES VIRUS | TNMEDEADQYFSHDDPISSD | 1578 | P04851.1 |
| | STRAIN | | | |
| | EDMONSTON | | | |
| 696 | RUBELLA VIRUS | TNPFQAAVARGLRPP | 1579 | CAA28880.1 |
| | STRAIN M33 | | | |
| 697 | MEASLES | TNSIEHQVKDVLTPL | 1580 | P06830.1 |
| | MORBILLIVIRUS | | | |
| 698 | MEASLES VIRUS | TNYLEQPVSNDLSNC | 1581 | P08362.1 |
| | STRAIN | | | |
| | EDMONSTON | | | |
| 699 | MEASLES | TNYLEQPVSNDLSNCMVALGELKLA | 1582 | AAR89413.1 |
| | MORBILLIVIRUS | AL | | |
| 700 | RUBELLA VIRUS | TPERPRLR | 1583 | CAJ88851.1 |
| 701 | RUBELLA VIRUS | TPERPRLRLVDADDPLLRTA | 1584 | P07566.1 |
| | STRAIN THERIEN | | | |
| 702 | MEASLES VIRUS | TPGNKPRIA | 1585 | P10050.1 |
| | STRAIN HALLE | | | |
| 703 | MEASLES VIRUS | TPLDIDTASESSQDP | 1586 | P04851.1 |
| | STRAIN | | | |
| | EDMONSTON | | | |
| 704 | MEASLES VIRUS | TPLDIDTASESSQDPQDSRR | 1587 | P04851.1 |
| | STRAIN | | | |
| | EDMONSTON | | | |
| 705 | MEASLES VIRUS | TPLFKIIGDEVGLRT | 1588 | P08362.1 |
| | STRAIN | | | |
| | EDMONSTON | | | |
| 706 | MEASLES VIRUS | TPLQCTM | 1589 | P04851.1 |
| | STRAIN | | | |
| | EDMONSTON | | | |
| 707 | RUBELLA VIRUS | TPVIGSQA | 1590 | CAJ88851.1 |
| 708 | RUBELLA VIRUS | TPVIGSQARK | 1591 | BAA19893.1 |
| 709 | MEASLES VIRUS | TQGYLISNFDESSCT | 1592 | P69353.1 |
| | STRAIN | | | |
| | EDMONSTON | | | |
| 710 | BORDETELLA | TRANPNPYTSRRSVASIVGTLVRM | 1593 | P04977.1 |
| | PERTUSSIS | | | |
| 711 | RUBELLA VIRUS | TRFGCAMRWGLPP | 1594 | NP_740663.1 |
| 712 | BORDETELLA | TRNTGQPATDHYYSNV | 1595 | AAA83981.1 |
| | PERTUSSIS | | | |
| 713 | MEASLES VIRUS | TRTPLQCTMTEIF | 1596 | P04851.1 |
| | STRAIN | | | |
| | EDMONSTON | | | |
| 714 | RUBELLA VIRUS | TRWHRLLRMPVR | 1597 | ABD64216.1 |
| 715 | MEASLES VIRUS | TSGSGGAIRGIKHII | 1598 | P04851.1 |
| | STRAIN | | | |
| | EDMONSTON | | | |
| 716 | MEASLES VIRUS | TSGSGGAIRGIKHIIIVPIP | 1599 | P04851.1 |
| | STRAIN | | | |
| | EDMONSTON | | | |
| 717 | MEASLES VIRUS | TSQGMYGGTYLVEKP | 1600 | P08362.1 |
| | STRAIN | | | |
| | EDMONSTON | | | |
| 718 | MEASLES | TSRVEHAVVYYVYSP | 1601 | P06830.1 |
| | MORBILLIVIRUS | | | |
| 719 | BORDETELLA | TSSSRRYTEVYL | 1602 | ACI04548.1 |
| | PERTUSSIS | | | |
| 720 | BORDETELLA | TSYVG | 1603 | ACI16088.1 |
| | PERTUSSIS | | | |
| 721 | MEASLES VIRUS | TTEDKISRAVGPRQA | 1604 | P04851.1 |
| | STRAIN | | | |
| | EDMONSTON | | | |
| 722 | MEASLES VIRUS | TTEDKISRAVGPRQAQVSFL | 1605 | P04851.1 |
| | STRAIN | | | |
| | EDMONSTON | | | |
| 723 | RUBELLA VIRUS | TTERIETRSARHP | 1606 | ABD64214.1 |
| | STRAIN M33 | | | |
| 724 | MEASLES VIRUS | TTNQAIEAIRQAGQE | 1607 | P69353.1 |
| | STRAIN | | | |
| | EDMONSTON | | | |
| 725 | RUBELLA VIRUS | TTSDPWHPPGPLGLK | 1608 | BAA28178.1 |
| 726 | MEASLES VIRUS | TVCSQNALYPMSPLL | 1609 | P69353.1 |
| | STRAIN | | | |
| | EDMONSTON | | | |
| 727 | RUBELLA VIRUS | TVNGEDVGAVPPGKF | 1610 | BAA28178.1 |
| 728 | MEASLES | TYPVEKPNLSSKRSE | 1611 | P06830.1 |
| | MORBILLIVIRUS | | | |
| 729 | RUBELLA VIRUS | VAGVSCNVTTEHPFC | 1612 | BAA28178.1 |
| 730 | BORDETELLA | VAPGIVIPPKALFTQQGGAYGRC | 1613 | P04979.1 |
| | PERTUSSIS | | | |
| 731 | RUBELLA VIRUS | VCHTKHMDFWCVEHDRPPPATPTPL | 1614 | NP_740663.1 |
| 732 | RUBELLA VIRUS | VCQRHSPDCSRLVGATPER | 1615 | BAA19893.1 |
| 733 | RUBELLA VIRUS | VDADDPLL | 1616 | CAJ88851.1 |
| 734 | RUBELLA VIRUS | VDADDPLLRTAPGPGEVWVT | 1617 | BAA19893.1 |
| 735 | CORYNEBACTERIUM | VDIGFAAYNFVESIINLFQV | 1618 | AAV70486.1 |
| | DIPHTHERIAE | | | |
| 736 | MEASLES VIRUS | VEIAEYRRLLRTVLE | 1619 | P69353.1 |
| | STRAIN | | | |
| | EDMONSTON | | | |
| 737 | MEASLES VIRUS | VELENSMGGLNFGRS | 1620 | P04851.1 |
| | STRAIN | | | |
| | EDMONSTON | | | |
| 738 | MEASLES VIRUS | VELENSMGGLNFGRSYFDPA | 1621 | P04851.1 |
| | STRAIN | | | |
| | EDMONSTON | | | |
| 739 | MEASLES | VELKIKIASGFGPLI | 1622 | P06830.1 |
| | MORBILLIVIRUS | | | |
| 740 | RUBELLA VIRUS | VEMDEWIHAHTTSD | 1623 | SRC265968 |
| 741 | RUBELLA VIRUS | VEMPEWIHAHTTSDP | 1624 | BAA28178.1 |
| 742 | CORYNEBACTERIUM | VERRLVKVL | 1625 | P33120.2 |
| | DIPHTHERIAE | | | |
| 743 | MEASLES | VESPGQLI | 1626 | ABI54110.1 |
| | MORBILLIVIRUS | | | |
| 744 | MEASLES VIRUS | VESPGQLIQRITDDP | 1627 | P04851.1 |
| | STRAIN | | | |
| | EDMONSTON | | | |
| 745 | MEASLES VIRUS | VESPGQLIQRITDDPDVSIR | 1628 | P04851.1 |
| | STRAIN | | | |
| | EDMONSTON | | | |
| 746 | RUBELLA VIRUS | VFALASYVQHPHKTV | 1629 | BAA28178.1 |
| 747 | RUBELLA VIRUS | VGATPERP | 1630 | CAJ88851.1 |
| 748 | RUBELLA VIRUS | VGATPERPRL | 1631 | BAA19893.1 |
| 749 | RUBELLA VIRUS | VGATPERPRLRLVDA | 1632 | BAA28178.1 |
| 750 | MEASLES VIRUS | VGIGSASYKVMTRSS | 1633 | P69353.1 |
| | STRAIN | | | |
| | EDMONSTON | | | |
| 751 | MEASLES VIRUS | VGLRTPQRFTDLVKF | 1634 | P08362.1 |
| | STRAIN | | | |
| | EDMONSTON | | | |
| 752 | CORYNEBACTERIUM | VHHNTEEIVAQSIALSSLMV | 1635 | AAV70486.1 |
| | DIPHTHERIAE | | | |
| 753 | MEASLES VIRUS | VHRLEGVSYNIGSQE | 1636 | P69353.1 |
| | STRAIN | | | |
| | EDMONSTON | | | |
| 754 | RUBELLA VIRUS | VIGSQARK | 1637 | CAJ88851.1 |
| 755 | BORDETELLA | VITGSI | 1638 | ACI16088.1 |
| | PERTUSSIS | | | |
| 756 | BORDETELLA | VITGTI | 1639 | ACI16083.1 |
| | PERTUSSIS | | | |
| 757 | MEASLES VIRUS | VKQSRGEA | 1640 | P04851.1 |
| | STRAIN | | | |
| | EDMONSTON | | | |
| 758 | MEASLES VIRUS | VLFVMFLSLI | 1641 | P08362.1 |
| | STRAIN | | | |
| | EDMONSTON | | | |
| 759 | MEASLES | VLFVMFLSLIGLLAI | 1642 | P06830.1 |
| | MORBILLIVIRUS | | | |
| 760 | MEASLES | VLTPLFKIIGDEVGL | 1643 | P06830.1 |
| | MORBILLIVIRUS | | | |
| 761 | MEASLES VIRUS | VMTRSSHQSLVIKLM | 1644 | P69353.1 |
| | STRAIN | | | |
| | EDMONSTON | | | |
| 762 | RUBELLA VIRUS | VPAAPCARIWNGTQR | 1645 | BAA28178.1 |
| 763 | RUBELLA VIRUS | VPPDPGDLVEYIMNY | 1646 | BAA28178.1 |
| 764 | MEASLES VIRUS | VQSVASSRRHKRFAG | 1647 | P69353.1 |
| | STRAIN | | | |
| | EDMONSTON | | | |
| 765 | BORDETELLA | VQTGGTSRTVTMRYLAS | 1648 | ACI16083.1 |
| | PERTUSSIS | | | |
| 766 | BORDETELLA | VQVRI | 1649 | ACI16083.1 |
| | PERTUSSIS | | | |
| 767 | RUBELLA VIRUS | VRAYNQPAGDV | 1650 | NP_740662.1 |
| 768 | RUBELLA VIRUS | VRFESKIVDGGCFAP | 1651 | BAA28178.1 |
| 769 | RUBELLA VIRUS | VRLAGVRFESKIVDG | 1652 | BAA28178.1 |
| 770 | MEASLES VIRUS | VSGSFGNRFILSQGN | 1653 | P69353.1 |
| | STRAIN | | | |
| | EDMONSTON | | | |
| 771 | BORDETELLA | VSKEEQYYDYEDAT | 1654 | AAA83981.1 |
| | PERTUSSIS | | | |
| 772 | MEASLES VIRUS | VSKGNCSGPTTIRGQ | 1655 | P08362.1 |
| | STRAIN | | | |
| | EDMONSTON | | | |
| 773 | RUBELLA VIRUS | VTAALLNTPPPYQVS | 1656 | BAA28178.1 |
| 774 | RUBELLA VIRUS | TGCYQCGTPALVEG | 1657 | BAA28178.1 |
| 775 | RUBELLA VIRUS | VTPVIGSQ | 1658 | CAJ88851.1 |
| 776 | RUBELLA VIRUS | VTTEHPFCNTPHGQLEVQVPPD | 1659 | P07566.1 |
| | STRAIN THERIEN | | | |
| 777 | MEASLES VIRUS | VVLAGAALGVATAAQ | 1660 | P69353.1 |
| | STRAIN | | | |
| | EDMONSTON | | | |
| 778 | RUBELLA VIRUS | VWQLSVAGVSCNVTT | 1661 | BAA28178.1 |
| 779 | RUBELLA VIRUS | VWVTPVIG | 1662 | CAJ88851.1 |
| 780 | RUBELLA VIRUS | VWVTPVIGSQAR | 1663 | BAA19893.1 |
| 781 | MEASLES VIRUS | VYILIAVCLGGLIGI | 1664 | P69353.1 |
| | STRAIN | | | |
| | EDMONSTON | | | |
| 782 | MEASLES VIRUS | VYLHRIDLGPPISLE | 1665 | P69353.1 |
| | STRAIN | | | |
| | EDMONSTON | | | |
| 783 | BORDETELLA | VYRYDSRP | 1666 | P04977.1 |
| | PERTUSSIS | | | |
| 784 | BORDETELLA | VYRYDSRPPEDV | 1667 | P04977.1 |
| | PERTUSSIS | | | |
| 785 | MEASLES | VYWLTIPPMKNLALG | 1668 | P06830.1 |
| | MORBILLIVIRUS | | | |
| 786 | RUBELLA VIRUS | WDLEATGACICEIPT | 1669 | BAA28178.1 |
| 787 | MEASLES | WDQKLWCRHFCVLAD | 1670 | AAR89413.1 |
| | MORBILLIVIRUS | | | |
| 788 | RUBELLA VIRUS | WGFPTDTVMSVFALA | 1671 | BAA28178.1 |
| 789 | RUBELLA VIRUS | WHPPGPLGLKFKTVR | 1672 | BAA28178.1 |
| 790 | RUBELLA VIRUS | WIHAHTTSDPWHPPG | 1673 | BAA28178.1 |
| 791 | MEASLES VIRUS | WLTIPPMKNLALGVI | 1674 | P08362.1 |
| | STRAIN | | | |
| | EDMONSTON | | | |
| 792 | MEASLES VIRUS | WQESRKNKAQTRTPLQCTMT | 1675 | P04851.1 |
| | STRAIN | | | |
| | EDMONSTON | | | |
| 793 | RUBELLA VIRUS | WVCIFMVCRRACR | 1676 | SRC265968 |
| 794 | RUBELLA VIRUS | WVTPVIGS | 1677 | CAJ88851.1 |
| 795 | MEASLES VIRUS | WYTTVPKYVATQGYL | 1678 | P69353.1 |
| | STRAIN | | | |
| | EDMONSTON | | | |
| 796 | MEASLES VIRUS | YALGGDINKVLEKLG | 1679 | P69353.1 |
| | STRAIN | | | |
| | EDMONSTON | | | |
| 797 | MEASLES VIRUS | YAMGVGVELE | 1680 | P04851.1 |
| | STRAIN | | | |
| | EDMONSTON | | | |
| 798 | MEASLES | YAMGVGVELEN | 1681 | ABI54110.1 |
| | MORBILLIVIRUS | | | |
| 799 | MEASLES | YCADVAAEELMNALV | 1682 | AAR89413.1 |
| | MORBILLIVIRUS | | | |
| 800 | MEASLES | YDFRDLTWCINPPER | 1683 | P06830.1 |
| | MORBILLIVIRUS | | | |
| 801 | BORDETELLA | YFEPGPT | 1684 | ACI16083.1 |
| | PERTUSSIS | | | |
| 802 | RUBELLA VIRUS | YFNPGGSYYKQYHPT | 1685 | BAA28178.1 |
| 803 | MEASLES VIRUS | YFRLGQEMVRRSAGK | 1686 | P04851.1 |
| | STRAIN | | | |
| | EDMONSTON | | | |
| 804 | MEASLES VIRUS | YFRLGQEMVRRSAGKVSSTL | 1687 | P04851.1 |
| | STRAIN | | | |
| | EDMONSTON | | | |
| 805 | MEASLES | YFYPFRLPIKGVPIE | 1688 | P06830.1 |
| | MORBILLIVIRUS | | | |
| 806 | BORDETELLA | YGDNAGRILAGALAT | 1689 | P04977.1 |
| | PERTUSSIS | | | |
| 807 | RUBELLA VIRUS | YGHATVEMPEWIHAH | 1690 | BAA28178.1 |
| 808 | RUBELLA VIRUS | YIMNYTGNQQSRWGL | 1691 | BAA28178.1 |
| 809 | MEASLES VIRUS | YINNELIPSMNQLSC | 1692 | P69353.1 |
| | STRAIN | | | |
| | EDMONSTON | | | |
| 810 | RUBELLA VIRUS | YLCTAPGCATQAPVP | 1693 | BAA28178.1 |
| 811 | MEASLES | YLFTVPIKEAGEDCH | 1694 | P06830.1 |
| | MORBILLIVIRUS | | | |
| 812 | MEASLES VIRUS | YLHDPEFNL | 1695 | ABK40531.1 |
| | STRAIN | | | |
| | EDMONSTON | | | |
| 813 | MEASLES VIRUS | YLNMSRLFV | 1696 | ABK40531.1 |
| | STRAIN | | | |
| | EDMONSTON | | | |
| 814 | MEASLES VIRUS | YPALGLHEF | 1697 | P10050.1 |
| | STRAIN HALLE | | | |
| 815 | MEASLES | YPALGLHEFA | 1698 | ABI54110.1 |
| | MORBILLIVIRUS | | | |
| 816 | MEASLES VIRUS | YPALGLHEFAGELST | 1699 | P04851.1 |
| | STRAIN | | | |
| | EDMONSTON | | | |
| 817 | MEASLES VIRUS | YPALGLHEFAGELSTLESLM | 1700 | P04851.1 |
| | STRAIN | | | |
| | EDMONSTON | | | |
| 818 | MEASLES VIRUS | YPFRLPIKGVPIELQ | 1701 | P08362.1 |
| | STRAIN | | | |
| | EDMONSTON | | | |
| 819 | MEASLES VIRUS | YPLLWSYAM | 1702 | P10050.1 |
| | STRAIN HALLE | | | |
| 820 | MUMPS | YQQQGRL | 1703 | P21186.1 |
| | RUBULAVIRUS | | | |
| 821 | BORDETELLA | YQSEYLAHRR | 1704 | P04977.1 |
| | PERTUSSIS | | | |
| 822 | MEASLES VIRUS | YRETGPSRASDARAA | 1705 | P04851.1 |
| | STRAIN | | | |
| | EDMONSTON | | | |
| 823 | MEASLES VIRUS | YRETGPSRASDARAAHLPTG | 1706 | P04851.1 |
| | STRAIN | | | |
| | EDMONSTON | | | |
| 824 | RUBELLA VIRUS | YRNASDVLPGHWLQGGWGCYNLSDW | 1707 | NP_740663.1 |
| 825 | MEASLES VIRUS | YRRLLRTVLEPIRDA | 1708 | P69353.1 |
| | STRAIN | | | |
| | EDMONSTON | | | |
| 826 | BORDETELLA | YRYDSRPP | 1709 | P04977.1 |
| | PERTUSSIS | | | |
| 827 | MEASLES VIRUS | YSGGDLLGILESRGI | 1710 | P69353.1 |
| | STRAIN | | | |
| | EDMONSTON | | | |
| 828 | BORDETELLA | YSKVTATBLLASTNSRLCAVFVRDG | 1711 | SRC280066 |
| | PERTUSSIS | | | |
| 829 | MEASLES VIRUS | YSPSRSFSYFYPFRL | 1712 | P08362.1 |
| | STRAIN | | | |
| | EDMONSTON | | | |
| 830 | RUBELLA VIRUS | YTGNQQSRWGLGSPNCHGPDWASPV | 1713 | P07566.1 |
| | STRAIN THERIEN | | | |
| 831 | MEASLES | YVLLAVLFV | 1714 | P08362.1 |
| | MORBILLIVIRUS | | | |
| 832 | MEASLES | YVYSPGRSFSYFYPF | 1715 | P06830.1 |
| | MORBILLIVIRUS | | | |
| 833 | BORDETELLA | YYDYEDATFQTYALTGISLCNPAASIC | 1716 | P04979.1 |
| | PERTUSSIS | | | |
| 834 | MEASLES | GDLLGILESRGIKAR | 1717 | AAF02706.1 |
| | MORBILLIVIRUS | | | |
| 835 | MEASLES | TVPKYVATQGYLISN | 1718 | AAL29688.1 |
| | MORBILLIVIRUS | | | |
| 836 | MEASLES | KPWDSPQEI | 1719 | P26035.1 |
| | MORBILLIVIRUS | | | |
| 837 | MEASLES | KPWESPQEI | 1720 | CAA34579.1 |
| | MORBILLIVIRUS | | | |
| 838 | BORDETELLA | ATYQSEYLAHRRIPP | 1721 | ACI04548.1 |
| | PERTUSSIS | | | |
| 839 | BORDETELLA | CMARQAESSEAMAAWSERAGEAMV | 1722 | ACI04548.1 |
| | PERTUSSIS | LVYYESIAYSF | | |
| 840 | BORDETELLA | CQVGSSNSAFVSTSSSRRYTEVYL | 1723 | ACI04548.1 |
| | PERTUSSIS | | | |
| 841 | BORDETELLA | DDPPATVYRYDSRPP | 1724 | ACI04548.1 |
| | PERTUSSIS | | | |
| 842 | BORDETELLA | GALATYQSEYLAHRRIPP | 1725 | ACI04548.1 |
| | PERTUSSIS | | | |
| 843 | BORDETELLA | MAAWSERAGEAMVLVYYESIAYSF | 1726 | ACI04548.1 |
| | PERTUSSIS | | | |
| 844 | BORDETELLA | MVLVYYESIAYSF | 1727 | ACI04548.1 |
| | PERTUSSIS | | | |
| 845 | BORDETELLA | PATVYRYDSRPPEDV | 1728 | ACI04548.1 |
| | PERTUSSIS | | | |
| 846 | BORDETELLA | YDSRPPEDV | 1729 | ACI04548.1 |
| | PERTUSSIS | | | |
| 847 | BORDETELLA | EPGITTNYDT | 1730 | ACI16087.1 |
| | PERTUSSIS | | | |
| 848 | BORDETELLA | GDLRAYKMVYATNPQTQLSN | 1731 | ACI16083.1 |
| | PERTUSSIS | | | |
| 849 | BORDETELLA | KNGDVEASAITTYVGFSVVYP | 1732 | ACI16083.1 |
| | PERTUSSIS | | | |
| 850 | BORDETELLA | KVTNGSKSYTLRYLASYVK | 1733 | ACI16088.1 |
| | PERTUSSIS | | | |
| 851 | BORDETELLA | QALGALKLYFEPGITTNYDTGDLIAY | 1734 | ACI16088.1 |
| | PERTUSSIS | KQTYNASGN | | |
| 852 | BORDETELLA | YATNPQTQLS | 1735 | ACI16083.1 |
| | PERTUSSIS | | | |
| 853 | CORYNEBACTERIUM | DNENPLSGKAGGVVKVTYPGLTKV | 1736 | AAV70486.1 |
| | DIPHTHERIAE | | | |
| 854 | CORYNEBACTERIUM | ENFSSYHGTKPGYVDSI | 1737 | AAV70486.1 |
| | DIPHTHERIAE | | | |
| 855 | CORYNEBACTERIUM | KVDNAETIKKELGLSLTEP | 1738 | AAV70486.1 |
| | DIPHTHERIAE | | | |
| 856 | RUBELLA VIRUS | MEDLQKALEAQSRALRAGLAA | 1739 | CAA28880.1 |
| | STRAIN M33 | | | |
| 857 | CORYNEBACTERIUM | QKGIQKPKSGTQGNYDDDWKGFY | 1740 | AAV70486.1 |
| | DIPHTHERIAE | | | |
| 858 | RUBELLA VIRUS | RTGAWQRKDWSRAPPPPEERQESRS | 1741 | CAA28880.1 |
| | STRAIN M33 | QTPAPKPSR | | |
| 859 | RUBELLA VIRUS | AAGASQSRRPRPPRHARAQHLPEMT | 1742 | SRC265968 |
| | | PAVT | | |
| 860 | RUBELLA VIRUS | CVTSWLWSEGEGAVFYRVDLHFINL | 1743 | CAA28880.1 |
| | | GTP | | |
| 861 | RUBELLA VIRUS | FRVGGTRWHRLLRMPVRGLDGDTAP | 1744 | CAA28880.1 |
| | | LP | | |
| 862 | CORYNEBACTERIUM | GRKIRMRCRAIDGDVTFCRPKSPVYV | 1745 | 1007216A |
| | DIPHTHERIAE | GN | | |
| 863 | RUBELLA VIRUS | GTPPLDEDGRWDPALMYNPCGPEPPA | 1746 | CAA28880.1 |
| | | HV | | |
| 864 | CORYNEBACTERIUM | GVHANLHVAFHRSSSEKIHSNEISSDS | 1747 | AAV70486.1 |
| | DIPHTHERIAE | IGVLGYQKTVDHTKVNSKLSLFFEIK | | |
| | | S | | |
| 865 | RUBELLA VIRUS | MASTTPITMEDLQKALEAQSRALRA | 1748 | ABD64200.1 |
| | | GLAAG | | |
| 866 | RUBELLA VIRUS | PELGPPTNPFQAAVARGLRPPLHDPD | 1749 | CAA28880.1 |
| | | TEAPTEAC | | |
| 867 | RUBELLA VIRUS | PLPPHTTERIETRSARHPWRIRFGAP | 1750 | CAA28880.1 |
| 868 | RUBELLA VIRUS | SRAPPPPEERQESRSQTPAPKPSRAPP | 1751 | CAA28880.1 |
| 869 | RUBELLA VIRUS | SRAPPQQPQPPRMQTGRGGSAPRPEL | 1752 | CAA28880.1 |
| | | GP | | |
| 870 | RUBELLA VIRUS | TPAVTPEGPAPPRTGAWQRKDWSRAP | 1753 | CAA28880.1 |
| | | P | | |
| 871 | RUBELLA VIRUS | VRAYNQPAGDVRGVWGKGERTYAE | 1754 | CAA28880.1 |
| | | QDFRV | | |
| 872 | RUBELLA VIRUS | AFGHSDAACWGFPTDTVMSV | 1755 | CAA28880.1 |
| 873 | RUBELLA VIRUS | CARIWNGTQRACTFWAVNAYS | 1756 | CAA28880.1 |
| 874 | RUBELLA VIRUS | EEAFTYLCTAPGCATQTPVPVR | 1757 | CAA28880.1 |
| 875 | RUBELLA VIRUS | FAPWDLEATGACICEIPTDV | 1758 | CAA28880.1 |
| 876 | RUBELLA VIRUS | GEDVGAFPPGKFVTAAL | 1759 | CAA28880.1 |
| 877 | RUBELLA VIRUS | GEVWVTPVIGSQARKCGLHI | 1760 | CAA28880.1 |
| 878 | RUBELLA VIRUS | GQLEVQVPPDPGDLVEYIMN | 1761 | CAA28880.1 |
| 879 | RUBELLA VIRUS | GSYYKQYHPTACEVEPAFGH | 1762 | CAA28880.1 |
| 880 | RUBELLA VIRUS | IHAHTTSDPWHPPGPLGLKF | 1763 | CAA28880.1 |
| 881 | RUBELLA VIRUS | IMNYTGNQQSRWGLGSPNCH | 1764 | CAA28880.1 |
| 882 | RUBELLA VIRUS | LHIRAGPYGHATVEMPEWIH | 1765 | CAA28880.1 |
| 883 | RUBELLA VIRUS | LKFKTVRPVALPRALAPPRN | 1766 | CAA28880.1 |
| 884 | RUBELLA VIRUS | LNTPPPYQVSCGGESDRASAGH | 1767 | CAA28880.1 |
| 885 | RUBELLA VIRUS | NCHGPDWASPVCQRHSPDCS | 1768 | CAA28880.1 |
| 886 | RUBELLA VIRUS | PDCSRLVGATPERPRLRLVD | 1769 | CAA28880.1 |
| 887 | RUBELLA VIRUS | PRNVRVTGCYQCGTPALVEG | 1770 | CAA28880.1 |
| 888 | RUBELLA VIRUS | PTDVSCEGLGAWVPTAPCARI | 1771 | CAA28880.1 |
| 889 | RUBELLA VIRUS | RLVDADDPLLRTAPGPGEVW | 1772 | CAA28880.1 |
| 890 | RUBELLA VIRUS | SVFALASYVQHPHKTVRVKF | 1773 | CAA28880.1 |
| 891 | RUBELLA VIRUS | VEGLAPGGGNCHLTVNGEDV | 1774 | CAA28880.1 |
| 892 | RUBELLA VIRUS | VKFHTETRTVWQLSVAGVSC | 1775 | CAA28880.1 |
| 893 | RUBELLA VIRUS | VPVRLAGVGFESKIVDGGCF | 1776 | CAA28880.1 |
| 894 | RUBELLA VIRUS | VSCNVTTEHPFCNTPHGQLE | 1777 | CAA28880.1 |
| 895 | BORDETELLA | AAASSPDAHVPF | 1778 | AAA22983.1 |
| | PERTUSSIS | | | |
| 896 | BORDETELLA | AASSPDA | 1779 | AAA22983.1 |
| | PERTUSSIS | | | |
| 897 | BORDETELLA | AKLGAAASSPDA | 1780 | AAA22983.1 |
| | PERTUSSIS | | | |
| 898 | BORDETELLA | AMKPYEVTPTRM | 1781 | AAA22983.1 |
| | PERTUSSIS | | | |
| 899 | BORDETELLA | AMTHLSPALADVPYVLVKTNMVVTS | 1782 | AAA22983.1 |
| | PERTUSSIS | | | |
| 900 | BORDETELLA | ASSPDAHVPFCF | 1783 | AAA22983.1 |
| | PERTUSSIS | | | |
| 901 | BORDETELLA | ASSPDAHVPFCFGKDLKRPGSSPME | 1784 | AAA22983.1 |
| | PERTUSSIS | | | |
| 902 | BORDETELLA | CFGKDLKRPGSS | 1785 | AAA22983.1 |
| | PERTUSSIS | | | |
| 903 | BORDETELLA | CFGKDLKRPGSSPMEVMLRAVFMQQ | 1786 | AAA22983.1 |
| | PERTUSSIS | | | |
| 904 | BORDETELLA | CGIAAKLGAAAS | 1787 | AAA22983.1 |
| | PERTUSSIS | | | |
| 905 | BORDETELLA | CGIAAKLGAAASSPDAHVPFCFGKD | 1788 | AAA22983.1 |
| | PERTUSSIS | | | |
| 906 | BORDETELLA | DAHVPFCFGKDL | 1789 | AAA22983.1 |
| | PERTUSSIS | | | |
| 907 | BORDETELLA | DLKRPGSSPMEV | 1790 | AAA22983.1 |
| | PERTUSSIS | | | |
| 908 | BORDETELLA | DVPYVLVKTNMV | 1791 | AAA22983.1 |
| | PERTUSSIS | | | |
| 909 | BORDETELLA | DVPYVLVKTNMVVTSVAMKPYEVTP | 1792 | AAA22983.1 |
| | PERTUSSIS | T | | |
| 910 | BORDETELLA | EVMLRAVFMQQR | 1793 | AAA22983.1 |
| | PERTUSSIS | | | |
| 911 | BORDETELLA | FEGKPALELIRM | 1794 | AAA22983.1 |
| | PERTUSSIS | | | |
| 912 | BORDETELLA | FLGPKQLTFEGK | 1795 | AAA22983.1 |
| | PERTUSSIS | | | |
| 913 | BORDETELLA | FLGPKQLTFEGKPALELIRMVECSG | 1796 | AAA22983.1 |
| | PERTUSSIS | | | |
| 914 | BORDETELLA | FMQQRPLRMFLGPKQLT | 1797 | AAA22983.1 |
| | PERTUSSIS | | | |
| 915 | BORDETELLA | GKDLKRPGSSPM | 1798 | AAA22983.1 |
| | PERTUSSIS | | | |
| 916 | BORDETELLA | GKDLKRPGSSPME | 1799 | AAA22983.1 |
| | PERTUSSIS | | | |
| 917 | BORDETELLA | GKPALELIRMVE | 1800 | AAA22983.1 |
| | PERTUSSIS | | | |
| 918 | BORDETELLA | GPKQLTFEGKPA | 1801 | AAA22983.1 |
| | PERTUSSIS | | | |
| 919 | BORDETELLA | HVPFCFGKDLKR | 1802 | AAA22983.1 |
| | PERTUSSIS | | | |
| 920 | BORDETELLA | IAAKLGAAASSP | 1803 | AAA22983.1 |
| | PERTUSSIS | | | |
| 921 | BORDETELLA | KPYEVTPTRMLV | 1804 | AAA22983.1 |
| | PERTUSSIS | | | |
| 922 | BORDETELLA | KQLTFEGKPALE | 1805 | AAA22983.1 |
| | PERTUSSIS | | | |
| 923 | BORDETELLA | KRPGSSPMEVML | 1806 | AAA22983.1 |
| | PERTUSSIS | | | |
| 924 | BORDETELLA | LELIRMVECSGK | 1807 | AAA22983.1 |
| | PERTUSSIS | | | |
| 925 | BORDETELLA | LGAAASSPDAHV | 1808 | AAA22983.1 |
| | PERTUSSIS | | | |
| 926 | BORDETELLA | LIRMVECSGKQD | 1809 | AAA22983.1 |
| | PERTUSSIS | | | |
| 927 | BORDETELLA | LVCGIAAKLGAA | 1810 | AAA22983.1 |
| | PERTUSSIS | | | |
| 928 | BORDETELLA | MKPYEVTPTRM | 1811 | AAA22983.1 |
| | PERTUSSIS | | | |
| 929 | BORDETELLA | MLRAVFMQQRPL | 1812 | AAA22983.1 |
| | PERTUSSIS | | | |
| 930 | BORDETELLA | MQQRPLRM | 1813 | AAA22983.1 |
| | PERTUSSIS | | | |
| 931 | BORDETELLA | MQQRPLRMFLGP | 1814 | AAA22983.1 |
| | PERTUSSIS | | | |
| 932 | BORDETELLA | MVVTSVAMKPYE | 1815 | AAA22983.1 |
| | PERTUSSIS | | | |
| 933 | BORDETELLA | MVVTSVAMKPYEVTPTRMLVCGIAA | 1816 | AAA22983.1 |
| | PERTUSSIS | | | |
| 934 | BORDETELLA | PALELIRMVECS | 1817 | AAA22983.1 |
| | PERTUSSIS | | | |
| 935 | BORDETELLA | PALELIRMVECSGK | 1818 | AAA22983.1 |
| | PERTUSSIS | | | |
| 936 | BORDETELLA | PFCFGKDLKRPG | 1819 | AAA22983.1 |
| | PERTUSSIS | | | |
| 937 | BORDETELLA | PGSSPMEVMLRA | 1820 | AAA22983.1 |
| | PERTUSSIS | | | |
| 938 | BORDETELLA | PGSSPMEVMLRAVF | 1821 | AAA22983.1 |
| | PERTUSSIS | | | |
| 939 | BORDETELLA | PKQLTFEGK | 1822 | AAA22983.1 |
| | PERTUSSIS | | | |
| 940 | BORDETELLA | PLRMFLGPKQLT | 1823 | AAA22983.1 |
| | PERTUSSIS | | | |
| 941 | BORDETELLA | PTRMLVCGIAAK | 1824 | AAA22983.1 |
| | PERTUSSIS | | | |
| 942 | BORDETELLA | PYVLVKTNMVVT | 1825 | AAA22983.1 |
| | PERTUSSIS | | | |
| 943 | BORDETELLA | QLTFEGKPALELIRMVECSGKQDCP | 1826 | AAA22983.1 |
| | PERTUSSIS | | | |
| 944 | BORDETELLA | QRPLRMFLGPKQ | 1827 | AAA22983.1 |
| | PERTUSSIS | | | |
| 945 | BORDETELLA | RAVFMQQRPLRM | 1828 | AAA22983.1 |
| | PERTUSSIS | | | |
| 946 | BORDETELLA | RMFLGPKQLTFE | 1829 | AAA22983.1 |
| | PERTUSSIS | | | |
| 947 | BORDETELLA | RMLVCGIAAKLG | 1830 | AAA22983.1 |
| | PERTUSSIS | | | |
| 948 | BORDETELLA | RMVECSGKQDCP | 1831 | AAA22983.1 |
| | PERTUSSIS | | | |
| 949 | BORDETELLA | SPDAHVPFCFGK | 1832 | AAA22983.1 |
| | PERTUSSIS | | | |
| 950 | BORDETELLA | SSPMEVMLRAVF | 1833 | AAA22983.1 |
| | PERTUSSIS | | | |
| 951 | BORDETELLA | SSPMEVMLRAVFMQQRPLRMFLGPK | 1834 | AAA22983.1 |
| | PERTUSSIS | | | |
| 952 | BORDETELLA | SVAMKPYEVTPT | 1835 | AAA22983.1 |
| | PERTUSSIS | | | |
| 953 | BORDETELLA | VECSGKQDCP | 1836 | AAA22983.1 |
| | PERTUSSIS | | | |
| 954 | BORDETELLA | VFMQQRPLRMFL | 1837 | AAA22983.1 |
| | PERTUSSIS | | | |
| 955 | BORDETELLA | VFMQQRPLRMFLGPKQLTFEGKPAL | 1838 | AAA22983.1 |
| | PERTUSSIS | | | |
| 956 | BORDETELLA | VKTNMVVTSVAM | 1839 | AAA22983.1 |
| | PERTUSSIS | | | |
| 957 | BORDETELLA | VLVKTNMVVTSV | 1840 | AAA22983.1 |
| | PERTUSSIS | | | |
| 958 | BORDETELLA | VTPTRMLVCGIA | 1841 | AAA22983.1 |
| | PERTUSSIS | | | |
| 959 | BORDETELLA | VTSVAMKPYEVT | 1842 | AAA22983.1 |
| | PERTUSSIS | | | |
| 960 | BORDETELLA | YEVTPTRMLVCG | 1843 | AAA22983.1 |
| | PERTUSSIS | | | |
| 961 | BORDETELLA | YEVTPTRMLVCGIAAKLGAAASSPD | 1844 | AAA22983.1 |
| | PERTUSSIS | | | |
| 962 | BORDETELLA | CASPYEGRYRDMYDALR | 1845 | P04979.1 |
| | PERTUSSIS | | | |
| 963 | BORDETELLA | CAVFVRDGQSV | 1846 | P04979.1 |
| | PERTUSSIS | | | |
| 964 | BORDETELLA | CITTIYKTG | 1847 | P04979.1 |
| | PERTUSSIS | | | |
| 965 | BORDETELLA | CPNGTRALTV | 1848 | P04979.1 |
| | PERTUSSIS | | | |
| 966 | BORDETELLA | DALRRLLYMIYMSG | 1849 | P04979.1 |
| | PERTUSSIS | | | |
| 967 | RUBELLA VIRUS | GNRGRGQRRDWSRAPPPPEERQETR | 1850 | P07566.1 |
| | STRAIN THERIEN | S | | |
| 968 | BORDETELLA | GQPAADHYYSKVT | 1851 | P04979.1 |
| | PERTUSSIS | | | |
| 969 | RUBELLA VIRUS | GSPNCHGPDWASPVCQRHS | 1852 | ABD64214.1 |
| 970 | MEASLES VIRUS | HKSLSTNLDVTNSIEHQ | 1853 | P08362.1 |
| | STRAIN | | | |
| | EDMONSTON | | | |
| 971 | BORDETELLA | LFTQQGGAYGRC | 1854 | P04979.1 |
| | PERTUSSIS | | | |
| 972 | MEASLES VIRUS | LIGLLAIAGIRLHRAAIYTAEI | 1855 | P08362.1 |
| | STRAIN | | | |
| | EDMONSTON | | | |
| 973 | MEASLES | PDTAADSELRRWIKY | 1856 | ABI54110.1 |
| | MORBILLIVIRUS | | | |
| 974 | RUBELLA VIRUS | PNCHGPDWASPVCQRHS | 1857 | P07566.1 |
| | STRAIN THERIEN | | | |
| 975 | RUBELLA VIRUS | QTPAPKPSRAPPQQPQPPRMQTGR | 1858 | ABD64216.1 |
| 976 | RUBELLA VIRUS | RAGLTAGASQSRRPRPPR | 1859 | CAA33016.1 |
| | VACCINE STRAIN | | | |
| | RA27/3 | | | |
| 977 | RUBELLA VIRUS | RFGAPQAFLAGLLLAAVAVGTARA | 1860 | ABD64214.1 |
| | VACCINE STRAIN | | | |
| | RA27/3 | | | |
| 978 | BORDETELLA | RGNAELQTYLRQITPG | 1861 | P04979.1 |
| | PERTUSSIS | | | |
| 979 | BORDETELLA | RVHVSKEEQYYDYED | 1862 | P04979.1 |
| | PERTUSSIS | | | |
| 980 | BORDETELLA | SIYGLYDGTYL | 1863 | P04979.1 |
| | PERTUSSIS | | | |
| 981 | BORDETELLA | SKVTATRLLASTNS | 1864 | P04979.1 |
| | PERTUSSIS | | | |
| 982 | BORDETELLA | TQQGGAYGRCPNGTRA | 1865 | P04979.1 |
| | PERTUSSIS | | | |
| 983 | BORDETELLA | VAPGIVIPPKAL | 1866 | P04979.1 |
| | PERTUSSIS | | | |
| 984 | BORDETELLA | DSRPPEDVFQNGFTAWG | 1867 | ACI04548.1 |
| | PERTUSSIS | | | |
| 985 | BORDETELLA | EHRMQEAVEAERAGR | 1868 | ACI04548.1 |
| | PERTUSSIS | | | |
| 986 | MEASLES VIRUS | ETCFQQACKGKIQALCENPEWA | 1869 | P08362.1 |
| | STRAIN | | | |
| | EDMONSTON | | | |
| 987 | BORDETELLA | EYVDTYGDNAGRILAGALATYQ | 1870 | ACI04548.1 |
| | PERTUSSIS | | | |
| 988 | BORDETELLA | HRRIPPENIRRVTR | 1871 | ACI04548.1 |
| | PERTUSSIS | | | |
| 989 | BORDETELLA | MARQAESSE | 1872 | ACI04548.1 |
| | PERTUSSIS | | | |
| 990 | BORDETELLA | MQEAVEAERAGR | 1873 | ACI04548.1 |
| | PERTUSSIS | | | |
| 991 | BORDETELLA | SQQTRANPNPYTSRR | 1874 | ACI04548.1 |
| | PERTUSSIS | | | |
| 992 | BORDETELLA | TRANPNPYTSRRSVASIVGTLVHG | 1875 | SRC280066 |
| | PERTUSSIS | | | |
| 993 | BORDETELLA | TVYRYDSRPPED | 1876 | ACI04548.1 |
| | PERTUSSIS | | | |
| 994 | MEASLES | NDRNLLD | 1877 | P10050.1 |
| | MORBILLIVIRUS | | | |
| 995 | MEASLES | NMEDEADQYFSHDDPISSDQSRFGW | 1878 | P04851.1 |
| | MORBILLIVIRUS | FENK | | |
| 996 | MEASLES | SRASDARAAHLPTGTPLDID | 1879 | P04851.1 |
| | MORBILLIVIRUS | | | |
| 997 | BORDETELLA | EDVFQNGFTAW | 1880 | ACI04548.1 |
| | PERTUSSIS | | | |
| 998 | CORYNEBACTERIUM | AEGSSSVEYINNWEQAK | 1881 | AAV70486.1 |
| | DIPHTHERIAE | | | |
| 999 | CORYNEBACTERIUM | GPIKNKMSESPNKT | 1882 | AAV70486.1 |
| | DIPHTHERIAE | | | |
| 1000 | MEASLES VIRUS | GPKLTGALIGILSLFVESPGQLIQRITD | 1883 | P10050.1 |
| | STRAIN HALLE | DPDV | | |
| 1001 | CORYNEBACTERIUM | GYQKTVDHTKVNSK | 1884 | AAV70486.1 |
| | DIPHTHERIAE | | | |
| 1002 | CORYNEBACTERIUM | KTVDH | 1885 | AAV70486.1 |
| | DIPHTHERIAE | | | |
| 1003 | CORYNEBACTERIUM | SESPNK | 1886 | AAV70486.1 |
| | DIPHTHERIAE | | | |
| 1004 | CORYNEBACTERIUM | AEGSSSVEYINNWEQAKALS | 1887 | AAV70486.1 |
| | DIPHTHERIAE | | | |
| 1005 | CORYNEBACTERIUM | AQAIPLVGELVDIGFAAYNF | 1888 | AAV70486.1 |
| | DIPHTHERIAE | | | |
| 1006 | CORYNEBACTERIUM | ASRVVLSLPFAEGSSSVEYI | 1889 | AAV70486.1 |
| | DIPHTHERIAE | | | |
| 1007 | CORYNEBACTERIUM | CINLDWDVIRDKTKTKIESL | 1890 | AAV70486.1 |
| | DIPHTHERIAE | | | |
| 1008 | CORYNEBACTERIUM | CRAIDGDVTFCRPKSPVYVG | 1891 | AAV70486.1 |
| | DIPHTHERIAE | | | |
| 1009 | CORYNEBACTERIUM | CRPKSPVYVGNGVHANLHVA | 1892 | AAV70486.1 |
| | DIPHTHERIAE | | | |
| 1010 | CORYNEBACTERIUM | DAAGYSVDNENPLSGKAGGV | 1893 | AAV70486.1 |
| | DIPHTHERIAE | | | |
| 1011 | CORYNEBACTERIUM | DKTKTKIESLKEHGPIKNKM | 1894 | AAV70486.1 |
| | DIPHTHERIAE | | | |
| 1012 | CORYNEBACTERIUM | EEFIKRFGDGASRVVLSLPF | 1895 | AAV70486.1 |
| | DIPHTHERIAE | | | |
| 1013 | CORYNEBACTERIUM | EKAKQYLEEFHQTALEHPEL | 1896 | AAV70486.1 |
| | DIPHTHERIAE | | | |
| 1014 | CORYNEBACTERIUM | FHRSSSEKIHSNEISSDSIG | 1897 | AAV70486.1 |
| | DIPHTHERIAE | | | |
| 1015 | CORYNEBACTERIUM | GADDVVDSSKSFVMENFSSY | 1898 | CAE11230.1 |
| | DIPHTHERIAE | | | |
| 1016 | CORYNEBACTERIUM | GKRGQDAMYEYMAQACAGNR | 1899 | AAV70486.1 |
| | DIPHTHERIAE | | | |
| 1017 | CORYNEBACTERIUM | GSVMGIADGAVHHNTEEIVA | 1900 | AAV70486.1 |
| | DIPHTHERIAE | | | |
| 1018 | CORYNEBACTERIUM | GTQGNYDDDWKGFYSTDNKY | 1901 | AAV70486.1 |
| | DIPHTHERIAE | | | |
| 1019 | CORYNEBACTERIUM | HDGYAVSWNTVEDSIIRTGF | 1902 | AAV70486.1 |
| | DIPHTHERIAE | | | |
| 1020 | CORYNEBACTERIUM | HGTKPGYVDSIQKGIQKPKS | 1903 | AAV70486.1 |
| | DIPHTHERIAE | | | |
| 1021 | CORYNEBACTERIUM | HQTALEHPELSELKTVTGTN | 1904 | AAV70486.1 |
| | DIPHTHERIAE | | | |
| 1022 | CORYNEBACTERIUM | IQKGIQKPKSGTQGNYDDDW | 1905 | AAV70486.1 |
| | DIPHTHERIAE | | | |
| 1023 | CORYNEBACTERIUM | KEHGPIKNKMSESPNKTVSE | 1906 | AAV70486.1 |
| | DIPHTHERIAE | | | |
| 1024 | CORYNEBACTERIUM | KGFYSTDNKYDAAGYSVDNE | 1907 | AAV70486.1 |
| | DIPHTHERIAE | | | |
| 1025 | CORYNEBACTERIUM | LDVNKSKTHISVNGRKIRMR | 1908 | AAV70486.1 |
| | DIPHTHERIAE | | | |
| 1026 | RUBELLA VIRUS | MASTIPITMEDLQKALEA | 1909 | SRC265968 |
| 1027 | CORYNEBACTERIUM | NGVHANLHVAFHRSSSEKIH | 1910 | AAV70486.1 |
| | DIPHTHERIAE | | | |
| 1028 | CORYNEBACTERIUM | NNWEQAKALSVELEINFETR | 1911 | AAV70486.1 |
| | DIPHTHERIAE | | | |
| 1029 | CORYNEBACTERIUM | NPLSGKAGGVVKVTYPGLTK | 1912 | AAV70486.1 |
| | DIPHTHERIAE | | | |
| 1030 | CORYNEBACTERIUM | PVFAGANYAAWAVNVAQVID | 1913 | AAV70486.1 |
| | DIPHTHERIAE | | | |
| 1031 | CORYNEBACTERIUM | SELKTVTGTNPVFAGANYAA | 1914 | AAV70486.1 |
| | DIPHTHERIAE | | | |
| 1032 | CORYNEBACTERIUM | SESPNKTVSEEKAKQYLEEF | 1915 | AAV70486.1 |
| | DIPHTHERIAE | | | |
| 1033 | CORYNEBACTERIUM | SETADNLEKTTAALSILPGI | 1916 | AAV70486.1 |
| | DIPHTHERIAE | | | |
| 1034 | CORYNEBACTERIUM | SFVMENFSSYHGTKPGYVDS | 1917 | AAV70486.1 |
| | DIPHTHERIAE | | | |
| 1035 | CORYNEBACTERIUM | SNEISSDSIGVLGYQKTVDH | 1918 | AAV70486.1 |
| | DIPHTHERIAE | | | |
| 1036 | CORYNEBACTERIUM | SPGHKTQPFLHDGYAVSWNT | 1919 | AAV70486.1 |
| | DIPHTHERIAE | | | |
| 1037 | CORYNEBACTERIUM | SVNGRKIRMRCRAIDGDVTF | 1920 | AAV70486.1 |
| | DIPHTHERIAE | | | |
| 1038 | CORYNEBACTERIUM | TAALSILPGIGSVMGIADGA | 1921 | AAV70486.1 |
| | DIPHTHERIAE | | | |
| 1039 | CORYNEBACTERIUM | TAENTPLPIAGVLLPTIPGK | 1922 | AAV70486.1 |
| | DIPHTHERIAE | | | |
| 1040 | CORYNEBACTERIUM | TEPLMEQVGTEEFIKRFGDG | 1923 | AAV70486.1 |
| | DIPHTHERIAE | | | |
| 1041 | CORYNEBACTERIUM | TIKKELGLSLTEPLMEQVGT | 1924 | AAV70486.1 |
| | DIPHTHERIAE | | | |
| 1042 | CORYNEBACTERIUM | TKVNSKLSLFFEIKS | 1925 | AAV70486.1 |
| | DIPHTHERIAE | | | |
| 1043 | CORYNEBACTERIUM | VEDSIIRTGFQGESGHDIKI | 1926 | AAV70486.1 |
| | DIPHTHERIAE | | | |
| 1044 | CORYNEBACTERIUM | VELEINFETRGKRGQDAMYE | 1927 | AAV70486.1 |
| | DIPHTHERIAE | | | |
| 1045 | CORYNEBACTERIUM | VESIINLFQVVHNSYNRPAY | 1928 | AAV70486.1 |
| | DIPHTHERIAE | | | |
| 1046 | CORYNEBACTERIUM | VHNSYNRPAYSPGHKTQPFL | 1929 | AAV70486.1 |
| | DIPHTHERIAE | | | |
| 1047 | CORYNEBACTERIUM | VKVTYPGLTKVLALKVDNAE | 1930 | AAV70486.1 |
| | DIPHTHERIAE | | | |
| 1048 | CORYNEBACTERIUM | VLALKVDNAETIKKELGLSL | 1931 | AAV70486.1 |
| | DIPHTHERIAE | | | |
| 1049 | CORYNEBACTERIUM | VLGYQKTVDHTKVNSKLSLF | 1932 | AAV70486.1 |
| | DIPHTHERIAE | | | |
| 1050 | CORYNEBACTERIUM | VRRSVGSSLSCINLDWDVIR | 1933 | AAV70486.1 |
| | DIPHTHERIAE | | | |
| 1051 | CORYNEBACTERIUM | WAVNVAQVIDSETADNLEKT | 1934 | AAV70486.1 |
| | DIPHTHERIAE | | | |
| 1052 | CORYNEBACTERIUM | YMAQACAGNRVRRSVGSSLS | 1935 | AAV70486.1 |
| | DIPHTHERIAE | | | |
| 1053 | BORDETELLA | AKAPPAPKPAPQPGP | 1936 | ABO77783.1 |
| | PERTUSSIS | | | |
| 1054 | BORDETELLA | APKPAPQPGP | 1937 | ABO77783.1 |
| | PERTUSSIS | | | |
| 1055 | BORDETELLA | APKPAPQPGPQPPQP | 1938 | ABO77783.1 |
| | PERTUSSIS | | | |
| 1056 | MEASLES VIRUS | AQTRTPLQCTMTEIF | 1939 | P04851.1 |
| | STRAIN | | | |
| | EDMONSTON | | | |
| 1057 | MEASLES VIRUS | ASRGTNMEDEADQYFSHDD | 1940 | P04851.1 |
| | STRAIN | | | |
| | EDMONSTON | | | |
| 1058 | BORDETELLA | ATIRR | 1941 | ABO77783.1 |
| | PERTUSSIS | | | |
| 1059 | BORDETELLA | DNRAG | 1942 | ABO77783.1 |
| | PERTUSSIS | | | |
| 1060 | BORDETELLA | EAPAPQPPAGRELSA | 1943 | ABO77783.1 |
| | PERTUSSIS | | | |
| 1061 | MEASLES VIRUS | EMVRRSAGKVSSTLASELGI | 1944 | P04851.1 |
| | STRAIN | | | |
| | EDMONSTON | | | |
| 1062 | BORDETELLA | GASEL | 1945 | ABO77783.1 |
| | PERTUSSIS | | | |
| 1063 | BORDETELLA | GDALAGGAVP | 1946 | AAA22980.1 |
| | PERTUSSIS | | | |
| 1064 | BORDETELLA | GDAPAGGAVP | 1947 | ABO77783.1 |
| | PERTUSSIS | | | |
| 1065 | BORDETELLA | GDTWDDD | 1948 | ABO77783.1 |
| | PERTUSSIS | | | |
| 1066 | BORDETELLA | GERQH | 1949 | ABO77783.1 |
| | PERTUSSIS | | | |
| 1067 | BORDETELLA | GGAVP | 1950 | ABO77783.1 |
| | PERTUSSIS | | | |
| 1068 | BORDETELLA | GGFGP | 1951 | P14283.3 |
| | PERTUSSIS | | | |
| 1069 | BORDETELLA | GGFGPGGFGP | 1952 | BAF35031.1 |
| | PERTUSSIS | | | |
| 1070 | BORDETELLA | GGFGPVLDGW | 1953 | ABO77783.1 |
| | PERTUSSIS | | | |
| 1071 | MEASLES VIRUS | GGKEDRRVKQSRGEARESYR | 1954 | P04851.1 |
| | STRAIN | | | |
| | EDMONSTON | | | |
| 1072 | BORDETELLA | GILLEN | 1955 | ABO77783.1 |
| | PERTUSSIS | | | |
| 1073 | BORDETELLA | GIRRFL | 1956 | ABO77783.1 |
| | PERTUSSIS | | | |
| 1074 | MEASLES VIRUS | HDDPISSDQSRFGWFENKEI | 1957 | P04851.1 |
| | STRAIN | | | |
| | EDMONSTON | | | |
| 1075 | MEASLES VIRUS | HEFAGELSTLESLMNLY | 1958 | P04851.1 |
| | STRAIN | | | |
| | EDMONSTON | | | |
| 1076 | BORDETELLA | HLGGLAGY | 1959 | ABO77783.1 |
| | PERTUSSIS | | | |
| 1077 | MEASLES VIRUS | HTTEDKISRAVGPRQAQVSFL | 1960 | P04851.1 |
| | STRAIN | | | |
| | EDMONSTON | | | |
| 1078 | MEASLES VIRUS | ICDIDTYIVEAGLASFILTI | 1961 | P04851.1 |
| | STRAIN | | | |
| | EDMONSTON | | | |
| 1079 | MEASLES VIRUS | IIIVPIPGDSSITTRSRLLD | 1962 | P04851.1 |
| | STRAIN | | | |
| | EDMONSTON | | | |
| 1080 | MEASLES VIRUS | ILDIKRTPGNKPRIAEMICD | 1963 | P04851.1 |
| | STRAIN | | | |
| | EDMONSTON | | | |
| 1081 | BORDETELLA | KALLYR | 1964 | ABO77783.1 |
| | PERTUSSIS | | | |
| 1082 | MEASLES VIRUS | KPPITSGSGGAIRGIKHIII | 1965 | P04851.1 |
| | STRAIN | | | |
| | EDMONSTON | | | |
| 1083 | BORDETELLA | LAGSGL | 1966 | ABO77783.1 |
| | PERTUSSIS | | | |
| 1084 | MEASLES VIRUS | LGITAEDARLVSEIAMHTTE | 1967 | P04851.1 |
| | STRAIN | | | |
| | EDMONSTON | | | |
| 1085 | MEASLES VIRUS | LGTILAQIWVLLAKAVTA | 1968 | P04851.1 |
| | STRAIN | | | |
| | EDMONSTON | | | |
| 1086 | MEASLES VIRUS | LPTGTPLDIDTASESSQD | 1969 | P04851.1 |
| | STRAIN | | | |
| | EDMONSTON | | | |
| 1087 | MEASLES VIRUS | MATLLRSLALFKRNKDK | 1970 | P04851.1 |
| | STRAIN | | | |
| | EDMONSTON | | | |
| 1088 | BORDETELLA | PAPQPP | 1971 | ABO77783.1 |
| | PERTUSSIS | | | |
| 1089 | MEASLES VIRUS | PDTAADSELRRWIKYTQQRR | 1972 | P04851.1 |
| | STRAIN | | | |
| | EDMONSTON | | | |
| 1090 | MEASLES VIRUS | PKLTGALIGILSLFVESPGQ | 1973 | P04851.1 |
| | STRAIN | | | |
| | EDMONSTON | | | |
| 1091 | BORDETELLA | PQP | 1974 | ABO77783.1 |
| | PERTUSSIS | | | |
| 1092 | BORDETELLA | PQPGP | 1975 | ABO77783.1 |
| | PERTUSSIS | | | |
| 1093 | BORDETELLA | PQPGPQPPQPPQPQP | 1976 | ABO77783.1 |
| | PERTUSSIS | | | |
| 1094 | MEASLES VIRUS | QDPQDSRRSAEPLLSCKPWQ | 1977 | P04851.1 |
| | STRAIN | | | |
| | EDMONSTON | | | |
| 1095 | MEASLES VIRUS | QRRVVGEFRLERKWLDVVR | 1978 | P04851.1 |
| | STRAIN | | | |
| | EDMONSTON | | | |
| 1096 | BORDETELLA | RELSA | 1979 | ABO77783.1 |
| | PERTUSSIS | | | |
| 1097 | BORDETELLA | RFAPQ | 1980 | ABO77783.1 |
| | PERTUSSIS | | | |
| 1098 | MEASLES VIRUS | SIQNKFSAGSYPLLWSYAMG | 1981 | P04851.1 |
| | STRAIN | | | |
| | EDMONSTON | | | |
| 1099 | BORDETELLA | SITLQAGAH | 1982 | ABO77783.1 |
| | PERTUSSIS | | | |
| 1100 | BORDETELLA | SLQPED | 1983 | ABO77783.1 |
| | PERTUSSIS | | | |
| 1101 | BORDETELLA | SNALSKRL | 1984 | ABO77783.1 |
| | PERTUSSIS | | | |
| 1102 | MEASLES VIRUS | SPGQLIQRITDDPDVSIRLL | 1985 | P04851.1 |
| | STRAIN | | | |
| | EDMONSTON | | | |
| 1103 | BORDETELLA | TELPSIPG | 1986 | ABO77783.1 |
| | PERTUSSIS | | | |
| 1104 | BORDETELLA | TFTLANK | 1987 | ABO77783.1 |
| | PERTUSSIS | | | |
| 1105 | BORDETELLA | TWDDD | 1988 | ABO77783.1 |
| | PERTUSSIS | | | |
| 1106 | MEASLES VIRUS | VSFLQGDQSENELPRLGGKE | 1989 | P04851.1 |
| | STRAIN | | | |
| | EDMONSTON | | | |
| 1107 | MEASLES VIRUS | WQESRKNKAQTRTPLQC | 1990 | P04851.1 |
| | STRAIN | | | |
| | EDMONSTON | | | |
| 1108 | MEASLES VIRUS | YAMGVGVELENSMGGLNFGR | 1991 | P04851.1 |
| | STRAIN | | | |
| | EDMONSTON | | | |
| 1109 | MEASLES VIRUS | YQQMGKPAPYMVNLENSI | 1992 | P04851.1 |
| | STRAIN | | | |
| | EDMONSTON | | | |
| 1110 | MEASLES VIRUS | MTRSSHQSLVIKLMP | 1993 | P69355.1 |
| | STRAIN HALLE | | | |
| 1111 | MEASLES VIRUS | PIRDALNAMTQNIRP | 1994 | P69355.1 |
| | STRAIN HALLE | | | |
| 1112 | RUBELLA VIRUS | ALLNTPPPYQVSCGGESDRASAGH | 1995 | CAA28880.1 |
| | STRAIN M33 | | | |
| 1113 | RUBELLA VIRUS | GLGSPNCHGPDWASPVCQRHS | 1996 | P07566.1 |
| | STRAIN THERIEN | | | |
| 1114 | RUBELLA VIRUS | GLGSPNCHGPDWASPVCQRHSPDCS | 1997 | P07566.1 |
| | STRAIN THERIEN | RLV | | |
| 1115 | RUBELLA VIRUS | NYTGNQQSRWGLGSPNCHGPDWASP | 1998 | P07566.1 |
| | STRAIN THERIEN | V | | |
| 1116 | RUBELLA VIRUS | TLPQPPCAHGQHYGHHHHQL | 1999 | P07566.1 |
| | STRAIN THERIEN | | | |
| 1117 | RUBELLA VIRUS | TVRVKFHTETRTVWQLSVAGVSCNV | 2000 | P07566.1 |
| | STRAIN THERIEN | T | | |
| 1118 | RUBELLA VIRUS | ASYFNPGGSYYKQYH | 2001 | BAA28178.1 |
| 1119 | RUBELLA VIRUS | FALASYVQHPHKTVR | 2002 | BAA28178.1 |
| 1120 | RUBELLA VIRUS | GGESDRASARVIDPAAQSFTG | 2003 | BAA28178.1 |
| 1121 | RUBELLA VIRUS | GPGEVWVTPVIGSQARKC | 2004 | BAA28178.1 |
| 1122 | RUBELLA VIRUS | GSQARKCGLHIRAG | 2005 | BAA28178.1 |
| 1123 | RUBELLA VIRUS | LVGATPERPRLRLVDADDPLLRTAP | 2006 | BAA28178.1 |
| 1124 | RUBELLA VIRUS | TAPGPGEVWVTPVI | 2007 | BAA28178.1 |
| 1125 | MEASLES | FIVLSIAYPTLSEIK | 2008 | AAL29688.1 |
| | MORBILLIVIRUS | | | |
| 1126 | MEASLES VIRUS | ETCFQQACKGKIQALCENPEWAPLK | 2009 | P08362.1 |
| | STRAIN | DNRIPSY | | |
| | EDMONSTON- | | | |
| | ZAGREB | | | |
| 1127 | MEASLES | LPRLGGKEDR | 2010 | P04851.1 |
| | MORBILLIVIRUS | | | |
| 1128 | MEASLES | MSKTEWNASQ | 2011 | SRC280080 |
| | MORBILLIVIRUS | | | |
| 1129 | MEASLES | SRFGWFENKE | 2012 | P04851.1 |
| | MORBILLIVIRUS | | | |
| 1130 | RUBELLA VIRUS | EACVTSWLWSEGEGAVFYRVDLHFI | 2013 | CAA28880.1 |
| | NLGT | | | |
| 1131 | RUBELLA VIRUS | MDFWCVEHDRPPPATPTSLTT | 2014 | CAA33016.1 |
| 1132 | RUBELLA VIRUS | PFLGHDGHHGGTLRVGQHHRNASDV | 2015 | CAA33016.1 |
| 1133 | RUBELLA VIRUS | RVKFHTETRTVWQLSVAGVSC | 2016 | BAA19893.1 |
| 1134 | MEASLES | AEEQARHVKNGLE | 2017 | ABO69699.1 |
| | MORBILLIVIRUS | | | |
| 1135 | MEASLES | ESPQEISKHQALG | 2018 | SRC280080 |
| | MORBILLIVIRUS | | | |
| 1136 | MEASLES | GVGVELENSMGGLNF | 2019 | ABI54110.1 |
| | MORBILLIVIRUS | | | |
| 1137 | MEASLES | IKGANDLAKFHQMLMKIIMK | 2020 | ABO69699.1 |
| | MORBILLIVIRUS | | | |
| 1138 | MEASLES | MSKTLHAQLGFKKT | 2021 | ABK40528.1 |
| | MORBILLIVIRUS | | | |
| 1139 | MEASLES | NASGLSRPSPSAH | 2022 | BAE98296.1 |
| | MORBILLIVIRUS | | | |
| 1140 | MEASLES | VRVIDPSLGDRKDE | 2023 | SRC280148 |
| | MORBILLIVIRUS | | | |
| 1141 | BORDETELLA | DLSDGDLLV | 2024 | AAC31207.1 |
| | PERTUSSIS | | | |
| 1142 | BORDETELLA | EAERAGRGTG | 2025 | ACI04548.1 |
| | PERTUSSIS | | | |
| 1143 | BORDETELLA | YRYDSRPPEDV | 2026 | ACI04548.1 |
| | PERTUSSIS | | | |
| 1144 | BORDETELLA | YVDTYGDNAG | 2027 | ACI04548.1 |
| | PERTUSSIS | | | |
| 1145 | MEASLES | SFSYFYPFR | 2028 | CAB43772.1 |
| | MORBILLIVIRUS | | | |
| 1146 | MUMPS | DIFIVSPR | 2029 | ADF49557.1 |
| | RUBULAVIRUS | | | |
| 1147 | MEASLES | QDSRRSADALLRLQAMAGISEEQGS | 2030 | CAA59302.1 |
| | MORBILLIVIRUS | DTDTPIVYNDRN | | |
| 1148 | MEASLES | SAEALLRLQA | 2031 | BAH22350.1 |
| | MORBILLIVIRUS | | | |
| 1149 | MEASLES | RIVINREHL | 2032 | BAB39835.1 |
| | MORBILLIVIRUS | | | |
| 1150 | MEASLES VIRUS | IPRFK | 2033 | BAB39848.1 |
| | GENOTYPEA | | | |
| 1151 | BORDETELLA | AAALSPMEI | 2034 | P15318.2 |
| | PERTUSSIS | | | |
| 1152 | BORDETELLA | AAASVVGAPV | 2035 | P15318.2 |
| | PERTUSSIS | | | |
| 1153 | BORDETELLA | AALGRQDSI | 2036 | P15318.2 |
| | PERTUSSIS | | | |
| 1154 | BORDETELLA | AAQRLVHAIA | 2037 | P15318.2 |
| | PERTUSSIS | | | |
| 1155 | BORDETELLA | AAVEAAEL | 2038 | P15318.2 |
| | PERTUSSIS | | | |
| 1156 | BORDETELLA | AGANVLNGL | 2039 | P15318.2 |
| | PERTUSSIS | | | |
| 1157 | BORDETELLA | AGYANAAD | 2040 | P15318.2 |
| | PERTUSSIS | | | |
| 1158 | BORDETELLA | AGYEQFEFRV | 2041 | P15318.2 |
| | PERTUSSIS | | | |
| 1159 | BORDETELLA | AITGNADNL | 2042 | P15318.2 |
| | PERTUSSIS | | | |
| 1160 | BORDETELLA | AKEKNATLM | 2043 | P15318.2 |
| | PERTUSSIS | | | |
| 1161 | BORDETELLA | AKGVFLSL | 2044 | P15318.2 |
| | PERTUSSIS | | | |
| 1162 | BORDETELLA | APHEYGFGI | 2045 | P15318.2 |
| | PERTUSSIS | | | |
| 1163 | BORDETELLA | ARQGNDLEI | 2046 | P15318.2 |
| | PERTUSSIS | | | |
| 1164 | BORDETELLA | ASVVGAPV | 2047 | P15318.2 |
| | PERTUSSIS | | | |
| 1165 | BORDETELLA | ATLMFRLV | 2048 | P15318.2 |
| | PERTUSSIS | | | |
| 1166 | BORDETELLA | AVAAAQRL | 2049 | P15318.2 |
| | PERTUSSIS | | | |
| 1167 | BORDETELLA | DAGANVLNGL | 2050 | P15318.2 |
| | PERTUSSIS | | | |
| 1168 | BORDETELLA | DALLAQLYR | 2051 | P15318.2 |
| | PERTUSSIS | | | |
| 1169 | BORDETELLA | DANGVLKHSI | 2052 | P15318.2 |
| | PERTUSSIS | | | |
| 1170 | BORDETELLA | DGDMNIGVI | 2053 | P15318.2 |
| | PERTUSSIS | | | |
| 1171 | BORDETELLA | DHVKNIENL | 2054 | P15318.2 |
| | PERTUSSIS | | | |
| 1172 | BORDETELLA | DIDMFAIM | 2055 | P15318.2 |
| | PERTUSSIS | | | |
| 1173 | BORDETELLA | DMFAIMPHL | 2056 | P15318.2 |
| | PERTUSSIS | | | |
| 1174 | BORDETELLA | DNVRNVENV | 2057 | P15318.2 |
| | PERTUSSIS | | | |
| 1175 | BORDETELLA | DNVRNVENVI | 2058 | P15318.2 |
| | PERTUSSIS | | | |
| 1176 | BORDETELLA | DTVDYSAM | 2059 | P15318.2 |
| | PERTUSSIS | | | |
| 1177 | BORDETELLA | DTVDYSAMI | 2060 | P15318.2 |
| | PERTUSSIS | | | |
| 1178 | BORDETELLA | DYLRQAGL | 2061 | P15318.2 |
| | PERTUSSIS | | | |
| 1179 | BORDETELLA | DYYDNVRNV | 2062 | P15318.2 |
| | PERTUSSIS | | | |
| 1180 | BORDETELLA | EFTTFVEI | 2063 | P15318.2 |
| | PERTUSSIS | | | |
| 1181 | BORDETELLA | EFTTFVEIV | 2064 | P15318.2 |
| | PERTUSSIS | | | |
| 1182 | BORDETELLA | EGYVFYEN | 2065 | P15318.2 |
| | PERTUSSIS | | | |
| 1183 | BORDETELLA | ENVQYRHV | 2066 | P15318.2 |
| | PERTUSSIS | | | |
| 1184 | BORDETELLA | EQLANSDGL | 2067 | P15318.2 |
| | PERTUSSIS | | | |
| 1185 | BORDETELLA | FGVGYGHDTI | 2068 | P15318.2 |
| | PERTUSSIS | | | |
| 1186 | BORDETELLA | FSPDVLETVP | 2069 | P15318.2 |
| | PERTUSSIS | | | |
| 1187 | BORDETELLA | FSVDHVKNI | 2070 | P15318.2 |
| | PERTUSSIS | | | |
| 1188 | BORDETELLA | GDDTYLFGV | 2071 | P15318.2 |
| | PERTUSSIS | | | |
| 1189 | BORDETELLA | GDDVFLQDL | 2072 | P15318.2 |
| | PERTUSSIS | | | |
| 1190 | BORDETELLA | GEDGNDIFL | 2073 | P15318.2 |
| | PERTUSSIS | | | |
| 1191 | BORDETELLA | GERFNVRKQL | 2074 | P15318.2 |
| | PERTUSSIS | | | |
| 1192 | BORDETELLA | GGAGNDTLV | 2075 | P15318.2 |
| | PERTUSSIS | | | |
| 1193 | BORDETELLA | GGDDFEAV | 2076 | P15318.2 |
| | PERTUSSIS | | | |
| 1194 | BORDETELLA | GKSEFTTFV | 2077 | P15318.2 |
| | PERTUSSIS | | | |
| 1195 | BORDETELLA | GKSLFDDGL | 2078 | P15318.2 |
| | PERTUSSIS | | | |
| 1196 | BORDETELLA | GNADNLKSV | 2079 | P15318.2 |
| | PERTUSSIS | | | |
| 1197 | BORDETELLA | GQLVEVDTL | 2080 | P15318.2 |
| | PERTUSSIS | | | |
| 1198 | BORDETELLA | GRSKFSPDV | 2081 | P15318.2 |
| | PERTUSSIS | | | |
| 1199 | BORDETELLA | GSSAYDTV | 2082 | P15318.2 |
| | PERTUSSIS | | | |
| 1200 | BORDETELLA | GTVEKWPAL | 2083 | P15318.2 |
| | PERTUSSIS | | | |
| 1201 | BORDETELLA | GVDYYDNV | 2084 | P15318.2 |
| | PERTUSSIS | | | |
| 1202 | BORDETELLA | GYEQFEFRV | 2085 | P15318.2 |
| | PERTUSSIS | | | |
| 1203 | BORDETELLA | HAVGAQDVV | 2086 | P15318.2 |
| | PERTUSSIS | | | |
| 1204 | BORDETELLA | IAAGRIGLGI | 2087 | P15318.2 |
| | PERTUSSIS | | | |
| 1205 | BORDETELLA | IGDAQANTL | 2088 | P15318.2 |
| | PERTUSSIS | | | |
| 1206 | BORDETELLA | IGLGILADL | 2089 | P15318.2 |
| | PERTUSSIS | | | |
| 1207 | BORDETELLA | IGNAAGIPL | 2090 | P15318.2 |
| | PERTUSSIS | | | |
| 1208 | BORDETELLA | IGTSMKDVL | 2091 | P15318.2 |
| | PERTUSSIS | | | |
| 1209 | BORDETELLA | IGVITDFEL | 2092 | P15318.2 |
| | PERTUSSIS | | | |
| 1210 | BORDETELLA | IPLTADIDM | 2093 | P15318.2 |
| | PERTUSSIS | | | |
| 1211 | BORDETELLA | ISKSALEL | 2094 | P15318.2 |
| | PERTUSSIS | | | |
| 1212 | BORDETELLA | ITGNADNL | 2095 | P15318.2 |
| | PERTUSSIS | | | |
| 1213 | BORDETELLA | KIFVVSAT | 2096 | P15318.2 |
| | PERTUSSIS | | | |
| 1214 | BORDETELLA | KQLNNANVYR | 2097 | P15318.2 |
| | PERTUSSIS | | | |
| 1215 | BORDETELLA | KVIGNAAGI | 2098 | P15318.2 |
| | PERTUSSIS | | | |
| 1216 | BORDETELLA | LAKVVSQL | 2099 | P15318.2 |
| | PERTUSSIS | | | |
| 1217 | BORDETELLA | LANDYARKI | 2100 | P15318.2 |
| | PERTUSSIS | | | |
| 1218 | BORDETELLA | LDYLRQAGL | 2101 | P15318.2 |
| | PERTUSSIS | | | |
| 1219 | BORDETELLA | LGKGFASL | 2102 | P15318.2 |
| | PERTUSSIS | | | |
| 1220 | BORDETELLA | LGKGFASLM | 2103 | P15318.2 |
| | PERTUSSIS | | | |
| 1221 | BORDETELLA | LGVDYYDN | 2104 | P15318.2 |
| | PERTUSSIS | | | |
| 1222 | BORDETELLA | LGVDYYDNV | 2105 | P15318.2 |
| | PERTUSSIS | | | |
| 1223 | BORDETELLA | LKHSIKLDVI | 2106 | P15318.2 |
| | PERTUSSIS | | | |
| 1224 | BORDETELLA | LQAGYIPV | 2107 | P15318.2 |
| | PERTUSSIS | | | |
| 1225 | BORDETELLA | LQLTGGTVE | 2108 | P15318.2 |
| | PERTUSSIS | | | |
| 1226 | BORDETELLA | LSAAVFGL | 2109 | P15318.2 |
| | PERTUSSIS | | | |
| 1227 | BORDETELLA | LSLGKGFASL | 2110 | P15318.2 |
| | PERTUSSIS | | | |
| 1228 | BORDETELLA | LSPMEIYGL | 2111 | P15318.2 |
| | PERTUSSIS | | | |
| 1229 | BORDETELLA | NAHDNFLAGG | 2112 | P15318.2 |
| | PERTUSSIS | | | |
| 1230 | BORDETELLA | NANVYREGV | 2113 | P15318.2 |
| | PERTUSSIS | | | |
| 1231 | BORDETELLA | NDTLYGGL | 2114 | P15318.2 |
| | PERTUSSIS | | | |
| 1232 | BORDETELLA | NGLAGNDVL | 2115 | P15318.2 |
| | PERTUSSIS | | | |
| 1233 | BORDETELLA | NNANVYREGV | 2116 | P15318.2 |
| | PERTUSSIS | | | |
| 1234 | BORDETELLA | NTVSYAAL | 2117 | P15318.2 |
| | PERTUSSIS | | | |
| 1235 | BORDETELLA | NVLRNIENAV | 2118 | P15318.2 |
| | PERTUSSIS | | | |
| 1236 | BORDETELLA | PALTFITPL | 2119 | P15318.2 |
| | PERTUSSIS | | | |
| 1237 | BORDETELLA | PETSNVLRNI | 2120 | P15318.2 |
| | PERTUSSIS | | | |
| 1238 | BORDETELLA | PMEIYGLV | 2121 | P15318.2 |
| | PERTUSSIS | | | |
| 1239 | BORDETELLA | PQAYFEKNL | 2122 | P15318.2 |
| | PERTUSSIS | | | |
| 1240 | BORDETELLA | PVNPNLSKL | 2123 | P15318.2 |
| | PERTUSSIS | | | |
| 1241 | BORDETELLA | QAGWNASSV | 2124 | P15318.2 |
| | PERTUSSIS | | | |
| 1242 | BORDETELLA | QAGWNASSVI | 2125 | P15318.2 |
| | PERTUSSIS | | | |
| 1243 | BORDETELLA | QDAANAGNL | 2126 | P15318.2 |
| | PERTUSSIS | | | |
| 1244 | BORDETELLA | QDAANAGNLL | 2127 | P15318.2 |
| | PERTUSSIS | | | |
| 1245 | BORDETELLA | QDSGYDSL | 2128 | P15318.2 |
| | PERTUSSIS | | | |
| 1246 | BORDETELLA | QQSHYADQL | 2129 | P15318.2 |
| | PERTUSSIS | | | |
| 1247 | BORDETELLA | RALQGAQAV | 2130 | P15318.2 |
| | PERTUSSIS | | | |
| 1248 | BORDETELLA | RGGLGLDTL | 2131 | P15318.2 |
| | PERTUSSIS | | | |
| 1249 | BORDETELLA | RKQLNNANV | 2132 | P15318.2 |
| | PERTUSSIS | | | |
| 1250 | BORDETELLA | RQDSGYDSL | 2133 | P15318.2 |
| | PERTUSSIS | | | |
| 1251 | BORDETELLA | RQFRYDGDM | 2134 | P15318.2 |
| | PERTUSSIS | | | |
| 1252 | BORDETELLA | RSKFSPDVL | 2135 | P15318.2 |
| | PERTUSSIS | | | |
| 1253 | BORDETELLA | SAGAAAGAL | 2136 | P15318.2 |
| | PERTUSSIS | | | |
| 1254 | BORDETELLA | SAHWGQRAL | 2137 | P15318.2 |
| | PERTUSSIS | | | |
| 1255 | BORDETELLA | SAMIHPGRI | 2138 | P15318.2 |
| | PERTUSSIS | | | |
| 1256 | BORDETELLA | SAMIHPGRIV | 2139 | P15318.2 |
| | PERTUSSIS | | | |
| 1257 | BORDETELLA | SAYDTVSGI | 2140 | P15318.2 |
| | PERTUSSIS | | | |
| 1258 | BORDETELLA | SAYGYEGD | 2141 | P15318.2 |
| | PERTUSSIS | | | |
| 1259 | BORDETELLA | SGGAGDDVL | 2142 | P15318.2 |
| | PERTUSSIS | | | |
| 1260 | BORDETELLA | SGLQVAGA | 2143 | P15318.2 |
| | PERTUSSIS | | | |
| 1261 | BORDETELLA | SGYDSLDGV | 2144 | P15318.2 |
| | PERTUSSIS | | | |
| 1262 | BORDETELLA | SLLTGALNGI | 2145 | P15318.2 |
| | PERTUSSIS | | | |
| 1263 | BORDETELLA | SPMEIYGL | 2146 | P15318.2 |
| | PERTUSSIS | | | |
| 1264 | BORDETELLA | SQMLTRGQL | 2147 | P15318.2 |
| | PERTUSSIS | | | |
| 1265 | BORDETELLA | SSAYDTVSGI | 2148 | P15318.2 |
| | PERTUSSIS | | | |
| 1266 | BORDETELLA | SSLAHGHTA | 2149 | P15318.2 |
| | PERTUSSIS | | | |
| 1267 | BORDETELLA | SSVTSGDSV | 2150 | P15318.2 |
| | PERTUSSIS | | | |
| 1268 | BORDETELLA | SVIGVQTTEI | 2151 | P15318.2 |
| | PERTUSSIS | | | |
| 1269 | BORDETELLA | TNTVSYAAL | 2152 | P15318.2 |
| | PERTUSSIS | | | |
| 1270 | BORDETELLA | TSLIAEGV | 2153 | P15318.2 |
| | PERTUSSIS | | | |
| 1271 | BORDETELLA | TSLLTGAL | 2154 | P15318.2 |
| | PERTUSSIS | | | |
| 1272 | BORDETELLA | TVPASPGL | 2155 | P15318.2 |
| | PERTUSSIS | | | |
| 1273 | BORDETELLA | VAKEKNATL | 2156 | P15318.2 |
| | PERTUSSIS | | | |
| 1274 | BORDETELLA | VAPHEYGFGI | 2157 | P15318.2 |
| | PERTUSSIS | | | |
| 1275 | BORDETELLA | VAVVTSLL | 2158 | P15318.2 |
| | PERTUSSIS | | | |
| 1276 | BORDETELLA | VFYENRAYG | 2159 | P15318.2 |
| | PERTUSSIS | | | |
| 1277 | BORDETELLA | VFYENRAYGV | 2160 | P15318.2 |
| | PERTUSSIS | | | |
| 1278 | BORDETELLA | VITDFELEV | 2161 | P15318.2 |
| | PERTUSSIS | | | |
| 1279 | BORDETELLA | VNPHSTSL | 2162 | P15318.2 |
| | PERTUSSIS | | | |
| 1280 | BORDETELLA | VNPHSTSLI | 2163 | P15318.2 |
| | PERTUSSIS | | | |
| 1281 | BORDETELLA | VNPNLSKL | 2164 | P15318.2 |
| | PERTUSSIS | | | |
| 1282 | BORDETELLA | VNPNLSKLF | 2165 | P15318.2 |
| | PERTUSSIS | | | |
| 1283 | BORDETELLA | VQQPIIEKL | 2166 | P15318.2 |
| | PERTUSSIS | | | |
| 1284 | BORDETELLA | VQYRHVEL | 2167 | P15318.2 |
| | PERTUSSIS | | | |
| 1285 | BORDETELLA | VSIAAAASV | 2168 | P15318.2 |
| | PERTUSSIS | | | |
| 1286 | BORDETELLA | VSIAAAASVV | 2169 | P15318.2 |
| | PERTUSSIS | | | |
| 1287 | BORDETELLA | VTSLLTGAL | 2170 | P15318.2 |
| | PERTUSSIS | | | |
| 1288 | BORDETELLA | VVLANASRI | 2171 | P15318.2 |
| | PERTUSSIS | | | |
| 1289 | BORDETELLA | WPALNLFSV | 2172 | P15318.2 |
| | PERTUSSIS | | | |
| 1290 | BORDETELLA | WVRKASAL | 2173 | P15318.2 |
| | PERTUSSIS | | | |
| 1291 | BORDETELLA | YAVQYRRKGG | 2174 | P15318.2 |
| | PERTUSSIS | | | |
| 1292 | BORDETELLA | YGGLGDDTL | 2175 | P15318.2 |
| | PERTUSSIS | | | |
| 1293 | BORDETELLA | YGLVQQSHYA | 2176 | P15318.2 |
| | PERTUSSIS | | | |
| 1294 | BORDETELLA | YGYEGDALL | 2177 | P15318.2 |
| | PERTUSSIS | | | |
| 1295 | BORDETELLA | YIPVNPNL | 2178 | P15318.2 |
| | PERTUSSIS | | | |
| 1296 | BORDETELLA | YSAMIHPGRI | 2179 | P15318.2 |
| | PERTUSSIS | | | |
| 1297 | BORDETELLA | YSQTGAHAGI | 2180 | P15318.2 |
| | PERTUSSIS | | | |
| 1298 | CORYNEBACTERIUM | AYNFVESIINLFQVVHNSYN | 2181 | CAE11230.1 |
| | DIPHTHERIAE | | | |
| 1299 | BORDETELLA | SGTTIK | 2182 | BAF35031.1 |
| | PERTUSSIS | | | |
| 1300 | BORDETELLA | RGHTLESAEGRKIFG | 2183 | AAA22974.1 |
| | PERTUSSIS | | | |
| 1301 | BORDETELLA | AGAMTVRDVAAAADLALQAGDA | 2184 | AAA22974.1 |
| | PERTUSSIS | | | |
| 1302 | BORDETELLA | AGAMTVRDVAAAADLALQAGDAL | 2185 | AAA22974.1 |
| | PERTUSSIS | | | |
| 1303 | BORDETELLA | ALAAVLVNPHIFTRIGAAQTSLADGA | 2186 | AAA22974.1 |
| | PERTUSSIS | AGPA | | |
| 1304 | BORDETELLA | ALSIDSMTALGA | 2187 | AAA22974.1 |
| | PERTUSSIS | | | |
| 1305 | BORDETELLA | DLSAARGADISGEGR | 2188 | AAA22974.1 |
| | PERTUSSIS | | | |
| 1306 | BORDETELLA | DQNRYEYIWGLY | 2189 | AAA22974.1 |
| | PERTUSSIS | | | |
| 1307 | BORDETELLA | DYTVSADAIALA | 2190 | AAA22974.1 |
| | PERTUSSIS | | | |
| 1308 | BORDETELLA | GPIVVEAGELVSHAGG | 2191 | AAA22974.1 |
| | PERTUSSIS | | | |
| 1309 | BORDETELLA | GRPEGLKIGAHSATSVSGSFDAL | 2192 | AAA22974.1 |
| | PERTUSSIS | | | |
| 1310 | BORDETELLA | ITVTSRGGFDNEGKMESNK | 2193 | AAA22974.1 |
| | PERTUSSIS | | | |
| 1311 | BORDETELLA | LDQNRYEYIWGLYP | 2194 | AAA22974.1 |
| | PERTUSSIS | | | |
| 1312 | BORDETELLA | LSAARGADISG | 2195 | AAA22974.1 |
| | PERTUSSIS | | | |
| 1313 | BORDETELLA | NKIRLMGPLQ | 2196 | AAA22974.1 |
| | PERTUSSIS | | | |
| 1314 | BORDETELLA | NKLGRIRAGEDM | 2197 | AAA22974.1 |
| | PERTUSSIS | | | |
| 1315 | BORDETELLA | NKLGRIRAGEDMHLDAPRIE | 2198 | AAA22974.1 |
| | PERTUSSIS | | | |
| 1316 | BORDETELLA | PHLRNTGQVVAG | 2199 | AAA22974.1 |
| | PERTUSSIS | | | |
| 1317 | BORDETELLA | QVDLHDLSAARGADISG | 2200 | AAA22974.1 |
| | PERTUSSIS | | | |
| 1318 | BORDETELLA | RDVAAAADLALQ | 2201 | AAA22974.1 |
| | PERTUSSIS | | | |
| 1319 | BORDETELLA | SAARGADISGEG | 2202 | AAA22974.1 |
| | PERTUSSIS | | | |
| 1320 | BORDETELLA | TKGEMQIAGKGGGSP | 2203 | AAA22974.1 |
| | PERTUSSIS | | | |
| 1321 | BORDETELLA | TVSADAIALAAQ | 2204 | AAA22974.1 |
| | PERTUSSIS | | | |
| 1322 | BORDETELLA | VVAGHDIHI | 2205 | AAA22974.1 |
| | PERTUSSIS | | | |
| 1323 | BORDETELLA | PSGPNHTKVVQLPKISKNALKANG | 2206 | CAD12823.1 |
| | PERTUSSIS | | | |
| 1324 | RUBELLA VIRUS | LVGATPERPRLRLVDADDPLLRTAPG | 2207 | BAA19902.1 |
| | | PGEVWVTPVIGSQAR | | |
| 1325 | RUBELLA VIRUS | QQSRWGLGSPNCHGPDWASPVCQRH | 2208 | BAA19902.1 |
| | | SP | | |
| 1326 | BORDETELLA | AGEAMVLVYYESIAYSF | 2209 | ACI04548.1 |
| | PERTUSSIS | | | |
| 1327 | BORDETELLA | GGVGLASTLWYAESNALSKRLGEL | 2210 | AAZ74322.1 |
| | PERTUSSIS | | | |
| 1328 | BORDETELLA | GTLVRIAPVIGACMARQA | 2211 | ACI04548.1 |
| | PERTUSSIS | | | |
| 1329 | BORDETELLA | IRRVTRVYHNGITGETTT | 2212 | ACI04548.1 |
| | PERTUSSIS | | | |
| 1330 | BORDETELLA | IVKTGERQHGIHIQGSDP | 2213 | AAZ74322.1 |
| | PERTUSSIS | | | |
| 1331 | BORDETELLA | IVKTGERQHGIHIQGSDPGGVRTA | 2214 | AAZ74338.1 |
| | PERTUSSIS | | | |
| 1332 | BORDETELLA | LRDTNVTAVPASGAPAAVSVLGAS | 2215 | AAZ74338.1 |
| | PERTUSSIS | | | |
| 1333 | BORDETELLA | PEAPAPQPPAGRELSAAANAAVNT | 2216 | AAZ74322.1 |
| | PERTUSSIS | | | |
| 1334 | BORDETELLA | AAADFAHAE | 2217 | WP_019247158.1 |
| | PERTUSSIS | | | |
| 1335 | BORDETELLA | AAAEVAGAL | 2218 | WP_019249248.1 |
| | PERTUSSIS | | | |
| 1336 | BORDETELLA | AAESTFESY | 2219 | WP_019247158.1 |
| | PERTUSSIS | | | |
| 1337 | BORDETELLA | AAGFDPEVQ | 2220 | WP_019248145.1 |
| | PERTUSSIS | | | |
| 1338 | BORDETELLA | AALGRGHSL | 2221 | AGS56996.1 |
| | PERTUSSIS | | | |
| 1339 | BORDETELLA | AAMQGAVVH | 2222 | AGT50936.1 |
| | PERTUSSIS | | | |
| 1340 | BORDETELLA | AAPAAHADW | 2223 | AGS56996.1 |
| | PERTUSSIS | | | |
| 1341 | BORDETELLA | AAQATVVQR | 2224 | WP_019247158.1 |
| | PERTUSSIS | | | |
| 1342 | BORDETELLA | AARVAGDNY | 2225 | WP_019249248.1 |
| | PERTUSSIS | | | |
| 1343 | BORDETELLA | AAVALLNKL | 2226 | WP_019249248.1 |
| | PERTUSSIS | | | |
| 1344 | BORDETELLA | ADDPPATVY | 2227 | AAW72734.1 |
| | PERTUSSIS | | | |
| 1345 | BORDETELLA | AEAGRFKVL | 2228 | AGS56996.1 |
| | PERTUSSIS | | | |
| 1346 | BORDETELLA | AEATQLVTA | 2229 | WP_019247158.1 |
| | PERTUSSIS | | | |
| 1347 | BORDETELLA | AEGGATLGA | 2230 | WP_019249248.1 |
| | PERTUSSIS | | | |
| 1348 | BORDETELLA | AEHGEVSIQ | 2231 | WP_019249248.1 |
| | PERTUSSIS | | | |
| 1349 | BORDETELLA | AEIAFYPKE | 2232 | WP_019249248.1 |
| | PERTUSSIS | | | |
| 1350 | BORDETELLA | AEKVTTPAV | 2233 | WP_019247158.1 |
| | PERTUSSIS | | | |
| 1351 | BORDETELLA | AELQTYLRQ | 2234 | 1BCP_C |
| | PERTUSSIS | | | |
| 1352 | BORDETELLA | AEQSLIEVG | 2235 | WP_019249248.1 |
| | PERTUSSIS | | | |
| 1353 | BORDETELLA | AESNALSKR | 2236 | AGS56996.1 |
| | PERTUSSIS | | | |
| 1354 | BORDETELLA | AESSEAMAA | 2237 | AFK26302.1 |
| | PERTUSSIS | | | |
| 1355 | BORDETELLA | AEVKVGYRA | 2238 | WP_019247158.1 |
| | PERTUSSIS | | | |
| 1356 | BORDETELLA | AEVTDTSPS | 2239 | WP_019249248.1 |
| | PERTUSSIS | | | |
| 1357 | BORDETELLA | AGKSLKKKN | 2240 | WP_019247158.1 |
| | PERTUSSIS | | | |
| 1358 | BORDETELLA | AGLAGPSAV | 2241 | WP_019249248.1 |
| | PERTUSSIS | | | |
| 1359 | BORDETELLA | AIRVGRGAR | 2242 | AGT50936.1 |
| | PERTUSSIS | | | |
| 1360 | BORDETELLA | ALAAIASAA | 2243 | WP_019248145.1 |
| | PERTUSSIS | | | |
| 1361 | BORDETELLA | ALADVPYVL | 2244 | AAA22983.1 |
| | PERTUSSIS | | | |
| 1362 | BORDETELLA | ALANDGTIV | 2245 | WP_019248658.1 |
| | PERTUSSIS | | | |
| 1363 | BORDETELLA | ALGRGHSLY | 2246 | AGS56996.1 |
| | PERTUSSIS | | | |
| 1364 | BORDETELLA | ALILAASPV | 2247 | WP_019248658.1 |
| | PERTUSSIS | | | |
| 1365 | BORDETELLA | ALMLACTGL | 2248 | AAA22974.1 |
| | PERTUSSIS | | | |
| 1366 | BORDETELLA | AMQGAVVHL | 2249 | AGT50936.1 |
| | PERTUSSIS | | | |
| 1367 | BORDETELLA | AMTHLSPAL | 2250 | AAA22983.1 |
| | PERTUSSIS | | | |
| 1368 | BORDETELLA | AMYGKHITL | 2251 | WP_019249248.1 |
| | PERTUSSIS | | | |
| 1369 | BORDETELLA | ANEANALLW | 2252 | WP_019249248.1 |
| | PERTUSSIS | | | |
| 1370 | BORDETELLA | APLSITLQA | 2253 | AGT50936.1 |
| | PERTUSSIS | | | |
| 1371 | BORDETELLA | APNALAWAL | 2254 | AAA22974.1 |
| | PERTUSSIS | | | |
| 1372 | BORDETELLA | APPAPKPAP | 2255 | AGS56996.1 |
| | PERTUSSIS | | | |
| 1373 | BORDETELLA | APPGAGFIY | 2256 | 1BCP_C |
| | PERTUSSIS | | | |
| 1374 | BORDETELLA | APQAAPLSI | 2257 | AGT50936.1 |
| | PERTUSSIS | | | |
| 1375 | BORDETELLA | PRIENTAK | 2258 | WP_019249248.1 |
| | PERTUSSIS | | | |
| 1376 | BORDETELLA | AQGKALLYR | 2259 | AGT50936.1 |
| | PERTUSSIS | | | |
| 1377 | BORDETELLA | AQITSYVGF | 2260 | WP_019248658.1 |
| | PERTUSSIS | | | |
| 1378 | BORDETELLA | AQLEVRGQR | 2261 | WP_019249248.1 |
| | PERTUSSIS | | | |
| 1379 | BORDETELLA | AQQLKQADR | 2262 | WP_019247699.1 |
| | PERTUSSIS | | | |
| 1380 | BORDETELLA | AQVTVAGRY | 2263 | WP_019249248.1 |
| | PERTUSSIS | | | |
| 1381 | BORDETELLA | ARRSRVRAL | 2264 | N_882284.1 |
| | PERTUSSIS | | | |
| 1382 | BORDETELLA | ASPRRARRA | 2265 | WP_019249248.1 |
| | PERTUSSIS | | | |
| 1383 | BORDETELLA | ASSPDAHVP | 2266 | AAA22983.1 |
| | PERTUSSIS | | | |
| 1384 | BORDETELLA | ASVSNPGTF | 2267 | WP_019249248.1 |
| | PERTUSSIS | | | |
| 1385 | BORDETELLA | ATWNFQSTY | 2268 | WP_019249248.1 |
| | PERTUSSIS | | | |
| 1386 | BORDETELLA | ATYIADSGF | 2269 | AGS56996.1 |
| | PERTUSSIS | | | |
| 1387 | BORDETELLA | AVAAPAVGA | 2270 | WP_019249248.1 |
| | PERTUSSIS | | | |
| 1388 | BORDETELLA | AVFMQQRPL | 2271 | AAA22983.1 |
| | PERTUSSIS | | | |
| 1389 | BORDETELLA | AVLVNPHIF | 2272 | WP_019249248.1 |
| | PERTUSSIS | | | |
| 1390 | BORDETELLA | CFGKDLKRP | 2273 | AAA22983.1 |
| | PERTUSSIS | | | |
| 1391 | BORDETELLA | CPSSLGNGV | 2274 | WP_019248145.1 |
| | PERTUSSIS | | | |
| 1392 | BORDETELLA | DAGHEHDTW | 2275 | AAA22984.1 |
| | PERTUSSIS | | | |
| 1393 | BORDETELLA | DAKHDLTVT | 2276 | WP_019249248.1 |
| | PERTUSSIS | | | |
| 1394 | BORDETELLA | DASGQHRLW | 2277 | AGS56996.1 |
| | PERTUSSIS | | | |
| 1395 | BORDETELLA | DATFETYAL | 2278 | YP_006628018.1 |
| | PERTUSSIS | | | |
| 1396 | BORDETELLA | DATFQTYAL | 2279 | 1BCP_C |
| | PERTUSSIS | | | |
| 1397 | BORDETELLA | DATLVGAKF | 2280 | WP_019247158.1 |
| | PERTUSSIS | | | |
| 1398 | BORDETELLA | DDEVDVSGR | 2281 | AAA22974.1 |
| | PERTUSSIS | | | |
| 1399 | BORDETELLA | DENGKPQTY | 2282 | WP_019247158.1 |
| | PERTUSSIS | | | |
| 1400 | BORDETELLA | DGPPSRPTT | 2283 | WP_019247158.1 |
| | PERTUSSIS | | | |
| 1401 | BORDETELLA | DHLTGRSCQ | 2284 | AAW72734.1 |
| | PERTUSSIS | | | |
| 1402 | BORDETELLA | DNEGKMESN | 2285 | WP_019249248.1 |
| | PERTUSSIS | | | |
| 1403 | BORDETELLA | DPPATVYRY | 2286 | AAW72734.1 |
| | PERTUSSIS | | | |
| 1404 | BORDETELLA | EATEGDATL | 2287 | WP_019247158.1 |
| | PERTUSSIS | | | |
| 1405 | BORDETELLA | EATQQAAGF | 2288 | WP_019248145.1 |
| | PERTUSSIS | | | |
| 1406 | BORDETELLA | ECSGKQDCP | 2289 | AAA22983.1 |
| | PERTUSSIS | | | |
| 1407 | BORDETELLA | EGGKLRGKD | 2290 | AAA22974.1 |
| | PERTUSSIS | | | |
| 1408 | BORDETELLA | EGKMESNKD | 2291 | WP_019249248.1 |
| | PERTUSSIS | | | |
| 1409 | BORDETELLA | EHRMQEAVE | 2292 | AAW72734.1 |
| | PERTUSSIS | | | |
| 1410 | BORDETELLA | EKRLDIDDA | 2293 | WP_019249248.1 |
| | PERTUSSIS | | | |
| 1411 | BORDETELLA | EPASANTLL | 2294 | AGS56996.1 |
| | PERTUSSIS | | | |
| 1412 | BORDETELLA | EPQAELAVF | 2295 | AGS56996.1 |
| | PERTUSSIS | | | |
| 1413 | BORDETELLA | EPVKLTLTG | 2296 | AGT50936.1 |
| | PERTUSSIS | | | |
| 1414 | BORDETELLA | ESAEGRKIF | 2297 | WP_019249248.1 |
| | PERTUSSIS | | | |
| 1415 | BORDETELLA | ESYSESHNF | 2298 | WP_019247158.1 |
| | PERTUSSIS | | | |
| 1416 | BORDETELLA | ETFCITTIY | 2299 | 1BCP_C |
| | PERTUSSIS | | | |
| 1417 | BORDETELLA | EVAGALELS | 2300 | WP_019249248.1 |
| | PERTUSSIS | | | |
| 1418 | BORDETELLA | EVAKVEVVP | 2301 | WP_019247158.1 |
| | PERTUSSIS | | | |
| 1419 | BORDETELLA | EVDGIIQEF | 2302 | WP_019249248.1 |
| | PERTUSSIS | | | |
| 1420 | BORDETELLA | EVRADNNFY | 2303 | WP_019248344.1 |
| | PERTUSSIS | | | |
| 1421 | BORDETELLA | FAILSSTTE | 2304 | WP_019247158.1 |
| | PERTUSSIS | | | |
| 1422 | BORDETELLA | FAISAYALK | 2305 | AAA22984.1 |
| | PERTUSSIS | | | |
| 1423 | BORDETELLA | FALYDGTYL | 2306 | AFK26303.1 |
| | PERTUSSIS | | | |
| 1424 | BORDETELLA | FDTMLGFAI | 2307 | AAA22984.1 |
| | PERTUSSIS | | | |
| 1425 | BORDETELLA | FEGKPALEL | 2308 | AAA22983.1 |
| | PERTUSSIS | | | |
| 1426 | BORDETELLA | FELGADHAV | 2309 | AGS56996.1 |
| | PERTUSSIS | | | |
| 1427 | BORDETELLA | FEPGITTNY | 2310 | WP_019248658.1 |
| | PERTUSSIS | | | |
| 1428 | BORDETELLA | FETYALTGI | 2311 | YP_006628018.1 |
| | PERTUSSIS | | | |
| 1429 | BORDETELLA | FIYRETFCI | 2312 | 1BCP_C |
| | PERTUSSIS | | | |
| 1430 | BORDETELLA | FPTRTTAPG | 2313 | NP_882284.1 |
| | PERTUSSIS | | | |
| 1431 | BORDETELLA | FQTYALTGI | 2314 | 1BCP_C |
| | PERTUSSIS | | | |
| 1432 | BORDETELLA | FTHADGWFL | 2315 | AGS56996.1 |
| | PERTUSSIS | | | |
| 1433 | BORDETELLA | FVRDGQSVI | 2316 | 1BCP_C |
| | PERTUSSIS | | | |
| 1434 | BORDETELLA | FVRSGQPVI | 2317 | YP_006628018.1 |
| | PERTUSSIS | | | |
| 1435 | BORDETELLA | FVWYVDTVI | 2318 | WP_019248866.1 |
| | PERTUSSIS | | | |
| 1436 | BORDETELLA | GAASSRQAL | 2319 | WP_019249248.1 |
| | PERTUSSIS | | | |
| 1437 | BORDETELLA | GAASSYFEY | 2320 | AAW72734.1 |
| | PERTUSSIS | | | |
| 1438 | BORDETELLA | GAFDLKTTF | 2321 | AFK26303.1 |
| | PERTUSSIS | | | |
| 1439 | BORDETELLA | GAPAAVSVL | 2322 | AGS56996.1 |
| | PERTUSSIS | | | |
| 1440 | BORDETELLA | GATRAVDSL | 2323 | AGS56996.1 |
| | PERTUSSIS | | | |
| 1441 | BORDETELLA | GAVPGGAVP | 2324 | AGT50936.1 |
| | PERTUSSIS | | | |
| 1442 | BORDETELLA | GEAMVLVYY | 2325 | AFK26302.1 |
| | PERTUSSIS | | | |
| 1443 | BORDETELLA | GEIALGDAT | 2326 | WP_019249248.1 |
| | PERTUSSIS | | | |
| 1444 | BORDETELLA | GELMAAQVA | 2327 | WP_019247158.1 |
| | PERTUSSIS | | | |
| 1445 | BORDETELLA | GGVPGGAVP | 2328 | AAZ74338.1 |
| | PERTUSSIS | | | |
| 1446 | BORDETELLA | GHEHDTWFD | 2329 | AAA22984.1 |
| | PERTUSSIS | | | |
| 1447 | BORDETELLA | GIGALKAGA | 2330 | WP_019249248.1 |
| | PERTUSSIS | | | |
| 1448 | BORDETELLA | GIVIPPKAL | 2331 | 1BCP_C |
| | PERTUSSIS | | | |
| 1449 | BORDETELLA | GKDLKRPGS | 2332 | AAA22983.1 |
| | PERTUSSIS | | | |
| 1450 | BORDETELLA | GKLPKPVTV | 2333 | WP_019247158.1 |
| | PERTUSSIS | | | |
| 1451 | BORDETELLA | GKSLKKKNQ | 2334 | WP_019247158.1 |
| | PERTUSSIS | | | |
| 1452 | BORDETELLA | GLDVQQGTV | 2335 | WP_019249248.1 |
| | PERTUSSIS | | | |
| 1453 | BORDETELLA | GLTDGVSRI | 2336 | WP_019249248.1 |
| | PERTUSSIS | | | |
| 1454 | BORDETELLA | GLYPTYTEW | 2337 | WP_019249248.1 |
| | PERTUSSIS | | | |
| 1455 | BORDETELLA | GLYQTYTEW | 2338 | YP_006626470.1 |
| | PERTUSSIS | | | |
| 1456 | BORDETELLA | GPPSRPTTP | 2339 | WP_019247158.1 |
| | PERTUSSIS | | | |
| 1457 | BORDETELLA | GPSAVAAPA | 2340 | WP_019249248.1 |
| | PERTUSSIS | | | |
| 1458 | BORDETELLA | GVAPTAQQL | 2341 | WP_019248866.1 |
| | PERTUSSIS | | | |
| 1459 | BORDETELLA | GVGLASTLW | 2342 | AGS56996.1 |
| | PERTUSSIS | | | |
| 1460 | BORDETELLA | GYEAGFSLG | 2343 | WP_019247158.1 |
| | PERTUSSIS | | | |
| 1461 | BORDETELLA | HADDGTIVI | 2344 | WP_019248145.1 |
| | PERTUSSIS | | | |
| 1462 | BORDETELLA | HADWNNQSI | 2345 | AGS56996.1 |
| | PERTUSSIS | | | |
| 1463 | BORDETELLA | HAEHEKDVR | 2346 | WP_019247158.1 |
| | PERTUSSIS | | | |
| 1464 | BORDETELLA | HANHYGTRI | 2347 | WP_019247158.1 |
| | PERTUSSIS | | | |
| 1465 | BORDETELLA | HAQGKALLY | 2348 | AGT50936.1 |
| | PERTUSSIS | | | |
| 1466 | BORDETELLA | HFIGYIYEV | 2349 | AAW72734.1 |
| | PERTUSSIS | | | |
| 1467 | BORDETELLA | HLSPALADV | 2350 | AAA22983.1 |
| | PERTUSSIS | | | |
| 1468 | BORDETELLA | HSLYASYEY | 2351 | AGS56996.1 |
| | PERTUSSIS | | | |
| 1469 | BORDETELLA | HVRGMLVPV | 2352 | AAA22974.1 |
| | PERTUSSIS | | | |
| 1470 | BORDETELLA | HVSKEEQYY | 2353 | YP_006628018.1 |
| | PERTUSSIS | | | |
| 1471 | BORDETELLA | HVTRGWSIF | 2354 | AFK26303.1 |
| | PERTUSSIS | | | |
| 1472 | BORDETELLA | IADSGFYLD | 2355 | AGS56996.1 |
| | PERTUSSIS | | | |
| 1473 | BORDETELLA | IAHRTELRG | 2356 | AGS56996.1 |
| | PERTUSSIS | | | |
| 1474 | BORDETELLA | IENTAKLSG | 2357 | WP_019249248.1 |
| | PERTUSSIS | | | |
| 1475 | BORDETELLA | IESKISQSV | 2358 | WP_019249248.1 |
| | PERTUSSIS | | | |
| 1476 | BORDETELLA | IETGGARRF | 2359 | AGT50936.1 |
| | PERTUSSIS | | | |
| 1477 | BORDETELLA | IIKDAPPGA | 2360 | 1BCP_C |
| | PERTUSSIS | | | |
| 1478 | BORDETELLA | IIQEFAADL | 2361 | WP_019249248.1 |
| | PERTUSSIS | | | |
| 1479 | BORDETELLA | ILAGALATY | 2362 | AAW72734.1 |
| | PERTUSSIS | | | |
| 1480 | BORDETELLA | ILLENPAAE | 2363 | AGS56996.1 |
| | PERTUSSIS | | | |
| 1481 | BORDETELLA | ILPILVLAL | 2364 | NP_882286.1 |
| | PERTUSSIS | | | |
| 1482 | BORDETELLA | IPFQRALRL | 2365 | WP_019248145.1 |
| | PERTUSSIS | | | |
| 1483 | BORDETELLA | ISVRVHVSK | 2366 | YP_006628018.1 |
| | PERTUSSIS | | | |
| 1484 | BORDETELLA | ITNETGKTY | 2367 | WP_019247158.1 |
| | PERTUSSIS | | | |
| 1485 | BORDETELLA | ITNKRAALI | 2368 | WP_019249248.1 |
| | PERTUSSIS | | | |
| 1486 | BORDETELLA | ITSYVGFSV | 2369 | WP_019248658.1 |
| | PERTUSSIS | | | |
| 1487 | BORDETELLA | ITVTSRGGF | 2370 | WP_019249248.1 |
| | PERTUSSIS | | | |
| 1488 | BORDETELLA | IVIPPKALF | 2371 | 1BCP_C |
| | PERTUSSIS | | | |
| 1489 | BORDETELLA | IVVEAGELV | 2372 | WP_019249248.1 |
| | PERTUSSIS | | | |
| 1490 | BORDETELLA | KAAKSVNLM | 2373 | WP_019247158.1 |
| | PERTUSSIS | | | |
| 1491 | BORDETELLA | KAAPLRRTT | 2374 | AGS56996.1 |
| | PERTUSSIS | | | |
| 1492 | BORDETELLA | KAGKLSATG | 2375 | WP_019249248.1 |
| | PERTUSSIS | | | |
| 1493 | BORDETELLA | KAGTIAAPW | 2376 | WP_019249248.1 |
| | PERTUSSIS | | | |
| 1494 | BORDETELLA | KAKSLTTEI | 2377 | WP_019249248.1 |
| | PERTUSSIS | | | |
| 1495 | BORDETELLA | KATVTTVQV | 2378 | WP_019247158.1 |
| | PERTUSSIS | | | |
| 1496 | BORDETELLA | KDYRDKDGG | 2379 | WP_019247158.1 |
| | PERTUSSIS | | | |
| 1497 | BORDETELLA | KEAATIVAA | 2380 | WP_019249248.1 |
| | PERTUSSIS | | | |
| 1498 | BORDETELLA | KEDVDAAQI | 2381 | WP_019248658.1 |
| | PERTUSSIS | | | |
| 1499 | BORDETELLA | KEVDGIIQE | 2382 | WP_019249248.1 |
| | PERTUSSIS | | | |
| 1500 | BORDETELLA | KGPKLAMPW | 2383 | AGS56996.1 |
| | PERTUSSIS | | | |
| 1501 | BORDETELLA | KLASGGGAV | 2384 | WP_019249248.1 |
| | PERTUSSIS | | | |
| 1502 | BORDETELLA | KLKGKNQEF | 2385 | AAA22984.1 |
| | PERTUSSIS | | | |
| 1503 | BORDETELLA | KLLHHILPI | 2386 | NP882286.1 |
| | PERTUSSIS | | | |
| 1504 | BORDETELLA | KPAPQPGPQ | 2387 | AGS56996.1 |
| | PERTUSSIS | | | |
| 1505 | BORDETELLA | KPAPTAPPM | 2388 | WP_019249248.1 |
| | PERTUSSIS | | | |
| 1506 | BORDETELLA | KPAVSVKVA | 2389 | WP_019249248.1 |
| | PERTUSSIS | | | |
| 1507 | BORDETELLA | KPDRAARVA | 2390 | WP_019249248.1 |
| | PERTUSSIS | | | |
| 1508 | BORDETELLA | KPLADIAVI | 2391 | YP_006626470.1 |
| | PERTUSSIS | | | |
| 1509 | BORDETELLA | KPLADIAVV | 2392 | WP_019249248.1 |
| | PERTUSSIS | | | |
| 1510 | BORDETELLA | KPLPKPLPV | 2393 | WP_019247158.1 |
| | PERTUSSIS | | | |
| 1511 | BORDETELLA | KQADRDFVW | 2394 | WP_019247699.1 |
| | PERTUSSIS | | | |
| 1512 | BORDETELLA | KSLPGGKLP | 2395 | WP_019247158.1 |
| | PERTUSSIS | | | |
| 1513 | BORDETELLA | KSYTLRYLA | 2396 | WP_019248658.1 |
| | PERTUSSIS | | | |
| 1514 | BORDETELLA | KTNMVVTSV | 2397 | AAA22983.1 |
| | PERTUSSIS | | | |
| 1515 | BORDETELLA | KVLAPRLYL | 2398 | AAA22974.1 |
| | PERTUSSIS | | | |
| 1516 | BORDETELLA | KVLSTKTTL | 2399 | WP_019247158.1 |
| | PERTUSSIS | | | |
| 1517 | BORDETELLA | LAAGAGLTL | 2400 | WP_019249248.1 |
| | PERTUSSIS | | | |
| 1518 | BORDETELLA | LAAIASAAH | 2401 | WP_019248145.1 |
| | PERTUSSIS | | | |
| 1519 | BORDETELLA | LAANGNGQW | 2402 | AGS56996.1 |
| | PERTUSSIS | | | |
| 1520 | BORDETELLA | LAAQVTQRG | 2403 | WP_019249248.1 |
| | PERTUSSIS | | | |
| 1521 | BORDETELLA | LAARGDGAL | 2404 | AAA22974.1 |
| | PERTUSSIS | | | |
| 1522 | BORDETELLA | LAAVLVNPH | 2405 | WP_019249248.1 |
| | PERTUSSIS | | | |
| 1523 | BORDETELLA | LAGSGLFRM | 2406 | AGS56996.1 |
| | PERTUSSIS | | | |
| 1524 | BORDETELLA | LAKALSAAL | 2407 | WP_019249248.1 |
| | PERTUSSIS | | | |
| 1525 | BORDETELLA | LALQAGDAL | 2408 | WP_019249248.1 |
| | PERTUSSIS | | | |
| 1526 | BORDETELLA | LAMPWTFHA | 2409 | AGS56996.1 |
| | PERTUSSIS | | | |
| 1527 | BORDETELLA | LANDGTIVI | 2410 | WP_019248658.1 |
| | PERTUSSIS | | | |
| 1528 | BORDETELLA | LAPTVGVAF | 2411 | WP_019247158.1 |
| | PERTUSSIS | | | |
| 1529 | BORDETELLA | LASDGSVDF | 2412 | AGS56996.1 |
| | PERTUSSIS | | | |
| 1530 | BORDETELLA | LATYQSEYL | 2413 | AAW72734.1 |
| | PERTUSSIS | | | |
| 1531 | BORDETELLA | LAWALMLAC | 2414 | AAA22974.1 |
| | PERTUSSIS | | | |
| 1532 | BORDETELLA | LEAGRRFTH | 2415 | AGS56996.1 |
| | PERTUSSIS | | | |
| 1533 | BORDETELLA | LFTQQGGAY | 2416 | 1BCPC |
| | PERTUSSIS | | | |
| 1534 | BORDETELLA | LKRPGSSPM | 2417 | AAA22983.1 |
| | PERTUSSIS | | | |
| 1535 | BORDETELLA | LLGSHVARA | 2418 | AFK26303.1 |
| | PERTUSSIS | | | |
| 1536 | BORDETELLA | LLHHILPIL | 2419 | NP882286.1 |
| | PERTUSSIS | | | |
| 1537 | BORDETELLA | LLNAGGTLL | 2420 | WP_019249248.1 |
| | PERTUSSIS | | | |
| 1538 | BORDETELLA | LMGPLQVNA | 2421 | WP_019249248.1 |
| | PERTUSSIS | | | |
| 1539 | BORDETELLA | LNDSKITMG | 2422 | WP_019248145.1 |
| | PERTUSSIS | | | |
| 1540 | BORDETELLA | LPEPVKLTL | 2423 | AGT50936.1 |
| | PERTUSSIS | | | |
| 1541 | BORDETELLA | LPILVLALL | 2424 | NP882286.1 |
| | PERTUSSIS | | | |
| 1542 | BORDETELLA | LPKISKNAL | 2425 | WP_019248145.1 |
| | PERTUSSIS | | | |
| 1543 | BORDETELLA | LPKPVTVKL | 2426 | WP_019247158.1 |
| | PERTUSSIS | | | |
| 1544 | BORDETELLA | LPLKANPMH | 2427 | NP882285.1 |
| | PERTUSSIS | | | |
| 1545 | BORDETELLA | LPPRPVVAE | 2428 | WP_019247158.1 |
| | PERTUSSIS | | | |
| 1546 | BORDETELLA | LPSIPGTSI | 2429 | AGS56996.1 |
| | PERTUSSIS | | | |
| 1547 | BORDETELLA | LPTHLYKNF | 2430 | AAA22984.1 |
| | PERTUSSIS | | | |
| 1548 | BORDETELLA | LPVRGVALV | 2431 | WP_019249248.1 |
| | PERTUSSIS | | | |
| 1549 | BORDETELLA | LPVSLTALD | 2432 | WP_019249248.1 |
| | PERTUSSIS | | | |
| 1550 | BORDETELLA | LQGGNKVPV | 2433 | WP_019249248.1 |
| | PERTUSSIS | | | |
| 1551 | BORDETELLA | LSAALGADW | 2434 | WP_019249248.1 |
| | PERTUSSIS | | | |
| 1552 | BORDETELLA | LSDAGHEHD | 2435 | AAA22984.1 |
| | PERTUSSIS | | | |
| 1553 | BORDETELLA | LSGEVQRKG | 2436 | WP_019249248.1 |
| | PERTUSSIS | | | |
| 1554 | BORDETELLA | LSSPSAITV | 2437 | WP_019249248.1 |
| | PERTUSSIS | | | |
| 1555 | BORDETELLA | LTWLAILAV | 2438 | AAW72734.1 |
| | PERTUSSIS | | | |
| 1556 | BORDETELLA | LVFSHVRGM | 2439 | AAA22974.1 |
| | PERTUSSIS | | | |
| 1557 | BORDETELLA | LVSDAGADL | 2440 | WP_019249248.1 |
| | PERTUSSIS | | | |
| 1558 | BORDETELLA | LVYYESIAY | 2441 | AFK26302.1 |
| | PERTUSSIS | | | |
| 1559 | BORDETELLA | MAAESTFES | 2442 | WP_019247158.1 |
| | PERTUSSIS | | | |
| 1560 | BORDETELLA | MAAGHDATL | 2443 | WP_019249248.1 |
| | PERTUSSIS | | | |
| 1561 | BORDETELLA | MAAWSERAG | 2444 | AFK26302.1 |
| | PERTUSSIS | | | |
| 1562 | BORDETELLA | MALGALGAA | 2445 | AGS56996.1 |
| | PERTUSSIS | | | |
| 1563 | BORDETELLA | MAPVMGACM | 2446 | ADA85123.1 |
| | PERTUSSIS | | | |
| 1564 | BORDETELLA | MATKGEMQI | 2447 | WP_019249248.1 |
| | PERTUSSIS | | | |
| 1565 | BORDETELLA | MDAKGGTLL | 2448 | WP_019249248.1 |
| | PERTUSSIS | | | |
| 1566 | BORDETELLA | MESNKDIVI | 2449 | WP_019249248.1 |
| | PERTUSSIS | | | |
| 1567 | BORDETELLA | MEVMLRAVF | 2450 | AAA22983.1 |
| | PERTUSSIS | | | |
| 1568 | BORDETELLA | MEYFKTPLP | 2451 | WP_019249248.1 |
| | PERTUSSIS | | | |
| 1569 | BORDETELLA | MHTIASILL | 2452 | AAA22984.1 |
| | PERTUSSIS | | | |
| 1570 | BORDETELLA | MIYMSGLAV | 2453 | 1BCPC |
| | PERTUSSIS | | | |
| 1571 | BORDETELLA | MLACTGLPL | 2454 | AAA22974.1 |
| | PERTUSSIS | | | |
| 1572 | BORDETELLA | MPIDRKTLC | 2455 | AFK26303.1 |
| | PERTUSSIS | | | |
| 1573 | BORDETELLA | MPKAPELDL | 2456 | WP_019249248.1 |
| | PERTUSSIS | | | |
| 1574 | BORDETELLA | MQRQAGLPL | 2457 | NP882285.1 |
| | PERTUSSIS | | | |
| 1575 | BORDETELLA | NALAWALML | 2458 | AAA22974.1 |
| | PERTUSSIS | | | |
| 1576 | BORDETELLA | NITNKRAAL | 2459 | WP_019249248.1 |
| | PERTUSSIS | | | |
| 1577 | BORDETELLA | NLMAAESTF | 2460 | WP_019247158.1 |
| | PERTUSSIS | | | |
| 1578 | BORDETELLA | NNETMSGRQ | 2461 | WP_019249248.1 |
| | PERTUSSIS | | | |
| 1579 | BORDETELLA | NPGSLIAEV | 2462 | WP_019249248.1 |
| | PERTUSSIS | | | |
| 1580 | BORDETELLA | NPMHTIASI | 2463 | NP882285.1 |
| | PERTUSSIS | | | |
| 1581 | BORDETELLA | NPQTQLSNI | 2464 | WP_019248145.1 |
| | PERTUSSIS | | | |
| 1582 | BORDETELLA | NPYTSRRSV | 2465 | AFK26302.1 |
| | PERTUSSIS | | | |
| 1583 | BORDETELLA | PAPTAPPMP | 2466 | WP_019249248.1 |
| | PERTUSSIS | | | |
| 1584 | BORDETELLA | PASANTLLL | 2467 | AGS56996.1 |
| | PERTUSSIS | | | |
| 1585 | BORDETELLA | PAVALPRPL | 2468 | WP_019249248.1 |
| | PERTUSSIS | | | |
| 1586 | BORDETELLA | PDAHVPFCF | 2469 | AAA22983.1 |
| | PERTUSSIS | | | |
| 1587 | BORDETELLA | PELGAAIRV | 2470 | AGT50936.1 |
| | PERTUSSIS | | | |
| 1588 | BORDETELLA | PFIIKLKDC | 2471 | WP_019248145.1 |
| | PERTUSSIS | | | |
| 1589 | BORDETELLA | PGPQPPQPP | 2472 | AGS56996.1 |
| | PERTUSSIS | | | |
| 1590 | BORDETELLA | PGPQPPQPQ | 2473 | AAZ74338.1 |
| | PERTUSSIS | | | |
| 1591 | BORDETELLA | PGPTTDYST | 2474 | WP_019248145.1 |
| | PERTUSSIS | | | |
| 1592 | BORDETELLA | PGTFTAGKD | 2475 | WP_019249248.1 |
| | PERTUSSIS | | | |
| 1593 | BORDETELLA | PGTPGDLLE | 2476 | AAA22984.1 |
| | PERTUSSIS | | | |
| 1594 | BORDETELLA | PKPKPKAER | 2477 | WP_019247158.1 |
| | PERTUSSIS | | | |
| 1595 | BORDETELLA | PKPKPKPKA | 2478 | WP_019247158.1 |
| | PERTUSSIS | | | |
| 1596 | BORDETELLA | PKPKPKPKP | 2479 | WP_019247158.1 |
| | PERTUSSIS | | | |
| 1597 | BORDETELLA | PLPPRPVVA | 2480 | WP_019247158.1 |
| | PERTUSSIS | | | |
| 1598 | BORDETELLA | PPAPKPAPQ | 2481 | AGS56996.1 |
| | PERTUSSIS | | | |
| 1599 | BORDETELLA | PPKPAPVAK | 2482 | WP_019247158.1 |
| | PERTUSSIS | | | |
| 1600 | BORDETELLA | PPRPVAAQV | 2483 | WP_019247158.1 |
| | PERTUSSIS | | | |
| 1601 | BORDETELLA | PPRPVVAEK | 2484 | WP_019247158.1 |
| | PERTUSSIS | | | |
| 1602 | BORDETELLA | PPSRPTTPP | 2485 | WP_019247158.1 |
| | PERTUSSIS | | | |
| 1603 | BORDETELLA | PRRARRALR | 2486 | WP_019249248.1 |
| | PERTUSSIS | | | |
| 1604 | BORDETELLA | QAAPLSITL | 2487 | AGT50936.1 |
| | PERTUSSIS | | | |
| 1605 | BORDETELLA | QADRDFVWY | 2488 | WP_019247699.1 |
| | PERTUSSIS | | | |
| 1606 | BORDETELLA | QAIVVGKDL | 2489 | WP_019249248.1 |
| | PERTUSSIS | | | |
| 1607 | BORDETELLA | QALGALKLY | 2490 | ACI16088.1 |
| | PERTUSSIS | | | |
| 1608 | BORDETELLA | QELALKLKG | 2491 | AAA22984.1 |
| | PERTUSSIS | | | |
| 1609 | BORDETELLA | QITQHGGPY | 2492 | NP882283.1 |
| | PERTUSSIS | | | |
| 1610 | BORDETELLA | QITQHGSPY | 2493 | AFK26303.1 |
| | PERTUSSIS | | | |
| 1611 | BORDETELLA | QPLPPRPVA | 2494 | WP_019247158.1 |
| | PERTUSSIS | | | |
| 1612 | BORDETELLA | QPPAGRELS | 2495 | AGS56996.1 |
| | PERTUSSIS | | | |
| 1613 | BORDETELLA | QQLKQADRD | 2496 | WP_019247699.1 |
| | PERTUSSIS | | | |
| 1614 | BORDETELLA | QQVQVLQRQ | 2497 | WP_019247158.1 |
| | PERTUSSIS | | | |
| 1615 | BORDETELLA | QSIVEAPEL | 2498 | AGT50936.1 |
| | PERTUSSIS | | | |
| 1616 | BORDETELLA | QVGSSNSAF | 2499 | AAW72734.1 |
| | PERTUSSIS | | | |
| 1617 | BORDETELLA | RAGLSPATW | 2500 | WP_019249248.1 |
| | PERTUSSIS | | | |
| 1618 | BORDETELLA | RARRALRQD | 2501 | WP_019249248.1 |
| | PERTUSSIS | | | |
| 1619 | BORDETELLA | RASASRARI | 2502 | WP_019249248.1 |
| | PERTUSSIS | | | |
| 1620 | BORDETELLA | RELSAAANA | 2503 | AGS56996.1 |
| | PERTUSSIS | | | |
| 1621 | BORDETELLA | RETFCITTI | 2504 | 1BCPC |
| | PERTUSSIS | | | |
| 1622 | BORDETELLA | RGFAQRQQL | 2505 | AGS56996.1 |
| | PERTUSSIS | | | |
| 1623 | BORDETELLA | RGSAATFTL | 2506 | WP_019248295.1 |
| | PERTUSSIS | | | |
| 1624 | BORDETELLA | RGWSIFALY | 2507 | AFK26303.1 |
| | PERTUSSIS | | | |
| 1625 | BORDETELLA | RKMLYLIYV | 2508 | YP_006628018.1 |
| | PERTUSSIS | | | |
| 1626 | BORDETELLA | RLRKMLYLI | 2509 | YP_00662 8018.1 |
| | PERTUSSIS | | | |
| 1627 | BORDETELLA | RPQITDAVT | 2510 | WP_019249248.1 |
| | PERTUSSIS | | | |
| 1628 | BORDETELLA | RPSVNGGRI | 2511 | WP_019249248.1 |
| | PERTUSSIS | | | |
| 1629 | BORDETELLA | RRFTHADGW | 2512 | AGS56996.1 |
| | PERTUSSIS | | | |
| 1630 | BORDETELLA | RSGARATSL | 2513 | AAA22974.1 |
| | PERTUSSIS | | | |
| 1631 | BORDETELLA | RSRVRALAW | 2514 | NP882284.1 |
| | PERTUSSIS | | | |
| 1632 | BORDETELLA | RSRVRALSW | 2515 | YP_006628019.1 |
| | PERTUSSIS | | | |
| 1633 | BORDETELLA | RTHGVGASL | 2516 | AGS56996.1 |
| | PERTUSSIS | | | |
| 1634 | BORDETELLA | RTRGQARSG | 2517 | AAA22974.1 |
| | PERTUSSIS | | | |
| 1635 | BORDETELLA | RVAPPAVAL | 2518 | WP_019249248.1 |
| | PERTUSSIS | | | |
| 1636 | BORDETELLA | RVLPEPVKL | 2519 | AGT50936.1 |
| | PERTUSSIS | | | |
| 1637 | BORDETELLA | RVRALAWLL | 2520 | NP882284.1 |
| | PERTUSSIS | | | |
| 1638 | BORDETELLA | RVRALSWLL | 2521 | YP_006628019.1 |
| | PERTUSSIS | | | |
| 1639 | BORDETELLA | RVTVSGGSL | 2522 | AGT50936.1 |
| | PERTUSSIS | | | |
| 1640 | BORDETELLA | SEAMAAWSE | 2523 | AFK26302.1 |
| | PERTUSSIS | | | |
| 1641 | BORDETELLA | SESHNFHAS | 2524 | WP_019247158.1 |
| | PERTUSSIS | | | |
| 1642 | BORDETELLA | SGEGRVNIG | 2525 | WP_019249248.1 |
| | PERTUSSIS | | | |
| 1643 | BORDETELLA | SGLAVRVHV | 2526 | 1BCPC |
| | PERTUSSIS | | | |
| 1644 | BORDETELLA | SLADISLGA | 2527 | WP_019249248.1 |
| | PERTUSSIS | | | |
| 1645 | BORDETELLA | SLFAILSST | 2528 | WP_019247158.1 |
| | PERTUSSIS | | | |
| 1646 | BORDETELLA | SLFAPHGNV | 2529 | AAZ74338.1 |
| | PERTUSSIS | | | |
| 1647 | BORDETELLA | SLSIDNATW | 2530 | AGS56996.1 |
| | PERTUSSIS | | | |
| 1648 | BORDETELLA | SPMEVMLRA | 2531 | AAA22983.1 |
| | PERTUSSIS | | | |
| 1649 | BORDETELLA | SPQPIRATV | 2532 | WP_019247158.1 |
| | PERTUSSIS | | | |
| 1650 | BORDETELLA | SPRRARRAL | 2533 | WP_019249248.1 |
| | PERTUSSIS | | | |
| 1651 | BORDETELLA | SPSRLAGTL | 2534 | WP_019249248.1 |
| | PERTUSSIS | | | |
| 1652 | BORDETELLA | SSTPLGSLF | 2535 | WP_019247158.1 |
| | PERTUSSIS | | | |
| 1653 | BORDETELLA | STYELLDYL | 2536 | WP_019249248.1 |
| | PERTUSSIS | | | |
| 1654 | BORDETELLA | SVAMKPYEV | 2537 | AAA22983.1 |
| | PERTUSSIS | | | |
| 1655 | BORDETELLA | SVAPNALAW | 2538 | AAA22974.1 |
| | PERTUSSIS | | | |
| 1656 | BORDETELLA | SVKVAKKLF | 2539 | WP_019249248.1 |
| | PERTUSSIS | | | |
| 1657 | BORDETELLA | TAFMSGRSL | 2540 | AAA22984.1 |
| | PERTUSSIS | | | |
| 1658 | BORDETELLA | TAGATPFDI | 2541 | WP_019248658.1 |
| | PERTUSSIS | | | |
| 1659 | BORDETELLA | TAPVTSPAW | 2542 | AAW72734.1 |
| | PERTUSSIS | | | |
| 1660 | BORDETELLA | TARTGWLTW | 2543 | AAW72734.1 |
| | PERTUSSIS | | | |
| 1661 | BORDETELLA | TEAQGVQVR | 2544 | WP_019248145.1 |
| | PERTUSSIS | | | |
| 1662 | BORDETELLA | TEVYLEHRM | 2545 | AAW72734.1 |
| | PERTUSSIS | | | |
| 1663 | BORDETELLA | TFEGKPALE | 2546 | AAA22983.1 |
| | PERTUSSIS | | | |
| 1664 | BORDETELLA | TFTGKVTNG | 2547 | WP_019248658.1 |
| | PERTUSSIS | | | |
| 1665 | BORDETELLA | TGDGGGHTD | 2548 | AGS56996.1 |
| | PERTUSSIS | | | |
| 1666 | BORDETELLA | TLAKALSAA | 2549 | WP_019249248.1 |
| | PERTUSSIS | | | |
| 1667 | BORDETELLA | TLANVGDTW | 2550 | AGS56996.1 |
| | PERTUSSIS | | | |
| 1668 | BORDETELLA | TLNASNLTL | 2551 | WP_019249248.1 |
| | PERTUSSIS | | | |
| 1669 | BORDETELLA | TLSSAHGNV | 2552 | WP_019249248.1 |
| | PERTUSSIS | | | |
| 1670 | BORDETELLA | TPFDIKLKE | 2553 | WP_019248658.1 |
| | PERTUSSIS | | | |
| 1671 | BORDETELLA | TPFIIKLKD | 2554 | WP_019248145.1 |
| | PERTUSSIS | | | |
| 1672 | BORDETELLA | TPGWSIYGL | 2555 | 1BCPC |
| | PERTUSSIS | | | |
| 1673 | BORDETELLA | TPLGSAATF | 2556 | AGS56996.1 |
| | PERTUSSIS | | | |
| 1674 | BORDETELLA | TPLGSLFAI | 2557 | WP_019247158.1 |
| | PERTUSSIS | | | |
| 1675 | BORDETELLA | TPLPVSLTA | 2558 | WP_019249248.1 |
| | PERTUSSIS | | | |
| 1676 | BORDETELLA | TRQGIMDQY | 2559 | YP_006626873.1 |
| | PERTUSSIS | | | |
| 1677 | BORDETELLA | TSKQDERNY | 2560 | WP_019247158.1 |
| | PERTUSSIS | | | |
| 1678 | BORDETELLA | TSPYDGKYW | 2561 | YP_006628018.1 |
| | PERTUSSIS | | | |
| 1679 | BORDETELLA | TSRRSVASI | 2562 | AFK26302.1 |
| | PERTUSSIS | | | |
| 1680 | BORDETELLA | TSRTVTMRY | 2563 | NP879898.1 |
| | PERTUSSIS | | | |
| 1681 | BORDETELLA | TTEYPNARY | 2564 | ADA85123.1 |
| | PERTUSSIS | | | |
| 1682 | BORDETELLA | TTEYSNARY | 2565 | AFK26302.1 |
| | PERTUSSIS | | | |
| 1683 | BORDETELLA | TTLGLEQTF | 2566 | WP_019247158.1 |
| | PERTUSSIS | | | |
| 1684 | BORDETELLA | TVLAAGAGL | 2567 | WP_019249248.1 |
| | PERTUSSIS | | | |
| 1685 | BORDETELLA | TVQELALKL | 2568 | AAA22984.1 |
| | PERTUSSIS | | | |
| 1686 | BORDETELLA | TVVQRNKHW | 2569 | WP_019247158.1 |
| | PERTUSSIS | | | |
| 1687 | BORDETELLA | VAAAADLAL | 2570 | WP_019249248.1 |
| | PERTUSSIS | | | |
| 1688 | BORDETELLA | VALASQARW | 2571 | AGS56996.1 |
| | PERTUSSIS | | | |
| 1689 | BORDETELLA | VAMKPYEVT | 2572 | AAA22983.1 |
| | PERTUSSIS | | | |
| 1690 | BORDETELLA | VARLVKLQG | 2573 | WP_019249248.1 |
| | PERTUSSIS | | | |
| 1691 | BORDETELLA | VAVAGGRWH | 2574 | AGS56996.1 |
| | PERTUSSIS | | | |
| 1692 | BORDETELLA | VEASAITTY | 2575 | WP_019248145.1 |
| | PERTUSSIS | | | |
| 1693 | BORDETELLA | VEDIGGKNY | 2576 | WP_019247158.1 |
| | PERTUSSIS | | | |
| 1694 | BORDETELLA | VEVSSPPPV | 2577 | WP_019247158.1 |
| | PERTUSSIS | | | |
| 1695 | BORDETELLA | VGAGGYEAG | 2578 | WP_019247158.1 |
| | PERTUSSIS | | | |
| 1696 | BORDETELLA | VGGGEHGRW | 2579 | WP_019249248.1 |
| | PERTUSSIS | | | |
| 1697 | BORDETELLA | VHVSKEEQY | 2580 | YP_006628018.1 |
| | PERTUSSIS | | | |
| 1698 | BORDETELLA | VIDGQKVLA | 2581 | AAA22974.1 |
| | PERTUSSIS | | | |
| 1699 | BORDETELLA | VIGACTSPY | 2582 | YP_006628018.1 |
| | PERTUSSIS | | | |
| 1700 | BORDETELLA | VKLGGVYEA | 2583 | AAA22974.1 |
| | PERTUSSIS | | | |
| 1701 | BORDETELLA | VLAPRLYLT | 2584 | AAA22974.1 |
| | PERTUSSIS | | | |
| 1702 | BORDETELLA | VLVKTNMVV | 2585 | AAA22983.1 |
| | PERTUSSIS | | | |
| 1703 | BORDETELLA | VPASGAPAA | 2586 | AGS56996.1 |
| | PERTUSSIS | | | |
| 1704 | BORDETELLA | VPFCFGKDL | 2587 | AAA22983.1 |
| | PERTUSSIS | | | |
| 1705 | BORDETELLA | VPVSEHCTV | 2588 | AAA22974.1 |
| | PERTUSSIS | | | |
| 1706 | BORDETELLA | VPVTPPKVE | 2589 | WP_019247158.1 |
| | PERTUSSIS | | | |
| 1707 | BORDETELLA | VRTVSAMEY | 2590 | WP_019249248.1 |
| | PERTUSSIS | | | |
| 1708 | BORDETELLA | VSGGSLSAP | 2591 | AGT50936.1 |
| | PERTUSSIS | | | |
| 1709 | BORDETELLA | VSSATKAKG | 2592 | WP_019248658.1 |
| | PERTUSSIS | | | |
| 1710 | BORDETELLA | VSSPPPVSV | 2593 | WP_019247158.1 |
| | PERTUSSIS | | | |
| 1711 | BORDETELLA | VSVKVAKKL | 2594 | WP_019249248.1 |
| | PERTUSSIS | | | |
| 1712 | BORDETELLA | VTMRYLASY | 2595 | WP_019248145.1 |
| | PERTUSSIS | | | |
| 1713 | BORDETELLA | VTSVAMKPY | 2596 | AAA22983.1 |
| | PERTUSSIS | | | |
| 1714 | BORDETELLA | VVAEKVTTP | 2597 | WP_019247158.1 |
| | PERTUSSIS | | | |
| 1715 | BORDETELLA | VVDGPPSRP | 2598 | WP_019247158.1 |
| | PERTUSSIS | | | |
| 1716 | BORDETELLA | VVETAQPLP | 2599 | WP_019247158.1 |
| | PERTUSSIS | | | |
| 1717 | BORDETELLA | WLTWLAILA | 2600 | AAW72734.1 |
| | PERTUSSIS | | | |
| 1718 | BORDETELLA | WTFHAGYRY | 2601 | AGS56996.1 |
| | PERTUSSIS | | | |
| 1719 | BORDETELLA | WVMTDNSNV | 2602 | AGS56996.1 |
| | PERTUSSIS | | | |
| 1720 | BORDETELLA | YAEHGEVSI | 2603 | WP_019249248.1 |
| | PERTUSSIS | | | |
| 1721 | BORDETELLA | YAIDGTACAG | 2584 | WP_019249248.1 |
| | PERTUSSIS | | | |
| 1722 | BORDETELLA | YALKSRIAL | 2605 | AAA22984.1 |
| | PERTUSSIS | | | |
| 1723 | BORDETELLA | YATNPQTQL | 2606 | WP_019248145.1 |
| | PERTUSSIS | | | |
| 1724 | BORDETELLA | YDTGDLIAY | 2607 | WP_019248658.1 |
| | PERTUSSIS | | | |
| 1725 | BORDETELLA | YEAGFSLGS | 2608 | WP_019247158.1 |
| | PERTUSSIS | | | |
| 1726 | BORDETELLA | YEDATFETY | 2609 | YP_006628018.1 |
| | PERTUSSIS | | | |
| 1727 | BORDETELLA | YENKSSTPL | 2610 | WP_019247158.1 |
| | PERTUSSIS | | | |
| 1728 | BORDETELLA | YEVTPTRML | 2611 | AAA22983.1 |
| | PERTUSSIS | | | |
| 1729 | BORDETELLA | YEYIWGLYP | 2612 | WP_019249248.1 |
| | PERTUSSIS | | | |
| 1730 | BORDETELLA | YEYIWGLYQ | 2613 | YP_006626470.1 |
| | PERTUSSIS | | | |
| 1731 | BORDETELLA | YEYSKGPKL | 2614 | AGS56996.1 |
| | PERTUSSIS | | | |
| 1732 | BORDETELLA | YFEPGPTTD | 2615 | WP_019248145.1 |
| | PERTUSSIS | | | |
| 1733 | BORDETELLA | YIWGLYPTY | 2616 | WP_019249248.1 |
| | PERTUSSIS | | | |
| 1734 | BORDETELLA | YIWGLYQTY | 2617 | YP_006626470.1 |
| | PERTUSSIS | | | |
| 1735 | BORDETELLA | YLRQITPGW | 2618 | 1BCPC |
| | PERTUSSIS | | | |
| 1736 | BORDETELLA | YMIYMSGLA | 2619 | 1BCPC |
| | PERTUSSIS | | | |
| 1737 | BORDETELLA | YPALRAALI | 2620 | WP_019248658.1 |
| | PERTUSSIS | | | |
| 1738 | BORDETELLA | YPGTPGDLL | 2621 | AAA22984.1 |
| | PERTUSSIS | | | |
| 1739 | BORDETELLA | YPTYTEWSV | 2622 | WP_019249248.1 |
| | PERTUSSIS | | | |
| 1740 | BORDETELLA | YQTYTEWSV | 2623 | YP_006626470.1 |
| | PERTUSSIS | | | |
| 1741 | BORDETELLA | YSTGDLRAY | 2624 | WP_019248145.1 |
| | PERTUSSIS | | | |
| 1742 | BORDETELLA | YTLRYLASY | 2625 | WP_019248658.1 |
| | PERTUSSIS | | | |
| 1743 | BORDETELLA | YVLVKTNMV | 2626 | AAA22983.1 |
| | PERTUSSIS | | | |
| 1744 | BORDETELLA | YYDYEDATF | 2627 | YP_006628018.1 |
| | PERTUSSIS | | | |
| 1745 | BORDETELLA | AAFIALYPNSQLAPT | 2628 | Q7VUO5 |
| | PERTUSSIS 509 | | | |
| 1746 | BORDETELLA | GGAEYNLALGQRRA | 2629 | Q7VUO4 |
| | PERTUSSIS 509 | | | |
| 1747 | BORDETELLA | GGAEYNLALGQRRADA | 2630 | Q7VUO4 |
| | PERTUSSIS 509 | | | |
| 1748 | BORDETELLA | IALYPNSQLAPT | 2631 | Q7VUO5 |
| | PERTUSSIS 509 | | | |
| 1749 | BORDETELLA | KPDQGEVVAVGPGKKTED | 2632 | P0A339.1 |
| | PERTUSSIS 509 | | | |
| 1750 | BORDETELLA | KPDQGEVVAVGPGKKTEDG | 2633 | P0A339.1 |
| | PERTUSSIS 509 | | | |
| 1751 | BORDETELLA | LAEVLDYHNFVLTQ | 2634 | Q7VWM1.1 |
| | PERTUSSIS 509 | | | |
| 1752 | CORYNEBACTERIUM | QSIALSSLMVAQAIP | 2635 | AAV70486.1 |
| | DIPHTHERIAE | | | |
| 1753 | CORYNEBACTERIUM | SIGVLGYQKTVDHTKVNSKLSLF | 2636 | AAV70486.1 |
| | DIPHTHERIAE | | | |
| 1754 | BORDETELLA | AAHADWNNQSIVKT | 2637 | ABO77783.1 |
| | PERTUSSIS | | | |
| 1755 | BORDETELLA | AALGRG | 2638 | ABO77783.1 |
| | PERTUSSIS | | | |
| 1756 | BORDETELLA | AALGRGHSLYASYE | 2639 | ABO77783.1 |
| | PERTUSSIS | | | |
| 1757 | BORDETELLA | AAPLRRTTLAMALG | 2640 | ABO77783.1 |
| | PERTUSSIS | | | |
| 1758 | BORDETELLA | AAPLSITLQAGAHA | 2641 | ABO77783.1 |
| | PERTUSSIS | | | |
| 1759 | BORDETELLA | ADAQGDIVATELPS | 2642 | ABO77783.1 |
| | PERTUSSIS | | | |
| 1760 | BORDETELLA | ADSGFYLDATLRAS | 2643 | ABO77783.1 |
| | PERTUSSIS | | | |
| 1761 | BORDETELLA | AELA | 2644 | ABO77783.1 |
| | PERTUSSIS | | | |
| 1762 | BORDETELLA | AELAVFRAGGGAYR | 2645 | ABO77783.1 |
| | PERTUSSIS | | | |
| 1763 | BORDETELLA | AELQFRNGSVTSSG | 2646 | ABO77783.1 |
| | PERTUSSIS | | | |
| 1764 | BORDETELLA | AGGRWHLGGLAGYT | 2647 | ABO77783.1 |
| | PERTUSSIS | | | |
| 1765 | BORDETELLA | AGVAAMQGAVVHLQ | 2648 | ABO77783.1 |
| | PERTUSSIS | | | |
| 1766 | BORDETELLA | AGYTRGDRGFTGDG | 2649 | ABO77783.1 |
| | PERTUSSIS | | | |
| 1767 | BORDETELLA | ALASQARWTGATRA | 2650 | ABO77783.1 |
| | PERTUSSIS | | | |
| 1768 | BORDETELLA | AMPWTFHAGYRYSW | 2651 | ABO77783.1 |
| | PERTUSSIS | | | |
| 1769 | BORDETELLA | AMQGAVVHLQRATIRRGDAP | 2652 | ABO77783.1 |
| | PERTUSSIS | | | |
| 1770 | BORDETELLA | ANGLRVRDE | 2653 | ABO77783.1 |
| | PERTUSSIS | | | |
| 1771 | BORDETELLA | ANGLRVRDEGGSSV | 2654 | ABO77783.1 |
| | PERTUSSIS | | | |
| 1772 | BORDETELLA | ANKDGKVDIGTYRY | 2655 | ABO77783.1 |
| | PERTUSSIS | | | |
| 1773 | BORDETELLA | APAAVSVLGASELT | 2656 | ABO77783.1 |
| | PERTUSSIS | | | |
| 1774 | BORDETELLA | APPAPKPAPQPGPQ | 2657 | ABO77783.1 |
| | PERTUSSIS | | | |
| 1775 | BORDETELLA | AQGILLENPAAELQ | 2658 | ABO77783.1 |
| | PERTUSSIS | | | |
| 1776 | BORDETELLA | ARWTGATRAVDSLS | 2659 | ABO77783.1 |
| | PERTUSSIS | | | |
| 1777 | BORDETELLA | ASLEAGRRFTHADG | 2660 | ABO77783.1 |
| | PERTUSSIS | | | |
| 1778 | BORDETELLA | ASYEYSKGPKLAMP | 2661 | ABO77783.1 |
| | PERTUSSIS | | | |
| 1779 | BORDETELLA | ATFTLANKD | 2662 | ABO77783.1 |
| | PERTUSSIS | | | |
| 1780 | BORDETELLA | ATFTLANKDGKVDI | 2663 | ABO77783.1 |
| | PERTUSSIS | | | |
| 1781 | BORDETELLA | ATRAVDSLSIDNAT | 2664 | ABO77783.1 |
| | PERTUSSIS | | | |
| 1782 | BORDETELLA | DDDGIALYVAGEQAQ | 2665 | ABO77783.1 |
| | PERTUSSIS | | | |
| 1783 | BORDETELLA | DDGIALYVAGEQAQ | 2666 | ABO77783.1 |
| | PERTUSSIS | | | |
| 1784 | BORDETELLA | DGGHITGGRAAGVA | 2667 | ABO77783.1 |
| | PERTUSSIS | | | |
| 1785 | BORDETELLA | DGIRRFLGTVTVKAGK | 2668 | ABO77783.1 |
| | PERTUSSIS | | | |
| 1786 | BORDETELLA | DGSVDFQQPAEAGR | 2669 | ABO77783.1 |
| | PERTUSSIS | | | |
| 1787 | BORDETELLA | DGYAVKGKYRTHGV | 2670 | ABO77783.1 |
| | PERTUSSIS | | | |
| 1788 | BORDETELLA | DIVATELPSIPGTS | 2671 | ABO77783.1 |
| | PERTUSSIS | | | |
| 1789 | BORDETELLA | DKLVVMQDASGQHR | 2672 | ABO77783.1 |
| | PERTUSSIS | | | |
| 1790 | BORDETELLA | DLGLSDKLVVMQDA | 2673 | ABO77783.1 |
| | PERTUSSIS | | | |
| 1791 | BORDETELLA | DNATWVMTDNSNVGA | 2674 | ABO77783.1 |
| | PERTUSSIS | | | |
| 1792 | BORDETELLA | DNATWVMTDNSNVGALRLA | 2675 | ABO77783.1 |
| | PERTUSSIS | | | |
| 1793 | BORDETELLA | DNRAGRRFDQKVAG | 2676 | ABO77783.1 |
| | PERTUSSIS | | | |
| 1794 | BORDETELLA | EAGRFKVLTVNTLA | 2677 | ABO77783.1 |
| | PERTUSSIS | | | |
| 1795 | BORDETELLA | ELAQSIVEAPELGA | 2678 | ABO77783.1 |
| | PERTUSSIS | | | |
| 1796 | BORDETELLA | ELGAAIRVGRGARV | 2679 | ABO77783.1 |
| | PERTUSSIS | | | |
| 1797 | BORDETELLA | ELGADHAVAVAGGR | 2680 | ABO77783.1 |
| | PERTUSSIS | | | |
| 1798 | BORDETELLA | ELPSIPGTSIGPLD | 2681 | ABO77783.1 |
| | PERTUSSIS | | | |
| 1799 | BORDETELLA | EPVKLTLTGGADAQ | 2682 | ABO77783.1 |
| | PERTUSSIS | | | |
| 1800 | BORDETELLA | EQAQASIADSTLQG | 2683 | ABO77783.1 |
| | PERTUSSIS | | | |
| 1801 | BORDETELLA | ERGANVTVQRSAIV | 2684 | ABO77783.1 |
| | PERTUSSIS | | | |
| 1802 | BORDETELLA | ERQHGIHIQGSDPG | 2685 | ABO77783.1 |
| | PERTUSSIS | | | |
| 1803 | BORDETELLA | EVGKRIELAGGRQV | 2686 | ABO77783.1 |
| | PERTUSSIS | | | |
| 1804 | BORDETELLA | FDGAGTVHTNGIAH | 2687 | ABO77783.1 |
| | PERTUSSIS | | | |
| 1805 | BORDETELLA | FQQPAEAGRFKVLT | 2688 | ABO77783.1 |
| | PERTUSSIS | | | |
| 1806 | BORDETELLA | FRAGGGAYRAANGL | 2689 | ABO77783.1 |
| | PERTUSSIS | | | |
| 1807 | BORDETELLA | GAHAQGKALLYRVL | 2690 | ABO77783.1 |
| | PERTUSSIS | | | |
| 1808 | BORDETELLA | GARVTVSGGSLSAP | 2691 | ABO77783.1 |
| | PERTUSSIS | | | |
| 1809 | BORDETELLA | GAYRAANGLRVRDE | 2692 | ABO77783.1 |
| | PERTUSSIS | | | |
| 1810 | BORDETELLA | GDAPAGGAVPGGAV | 2693 | ABO77783.1 |
| | PERTUSSIS | | | |
| 1811 | BORDETELLA | GGAVPGGAVPGGFG | 2694 | ABO77783.1 |
| | PERTUSSIS | | | |
| 1812 | BORDETELLA | GGAVPGGFGPVLDG | 2695 | ABO77783.1 |
| | PERTUSSIS | | | |
| 1813 | BORDETELLA | GGFGPVLDGWYGVD | 2696 | ABO77783.1 |
| | PERTUSSIS | | | |
| 1814 | BORDETELLA | GGLHIGALQSLQPE | 2697 | ABO77783.1 |
| | PERTUSSIS | | | |
| 1815 | BORDETELLA | GGVQIERGANVTVQ | 2698 | ABO77783.1 |
| | PERTUSSIS | | | |
| 1816 | BORDETELLA | GHSLYASYEYSKGP | 2699 | ABO77783.1 |
| | PERTUSSIS | | | |
| 1817 | BORDETELLA | GHTDSVHVGGYATY | 2700 | ABO77783.1 |
| | PERTUSSIS | | | |
| 1818 | BORDETELLA | GIAHRTELRGTRAE | 2701 | ABO77783.1 |
| | PERTUSSIS | | | |
| 1819 | BORDETELLA | GKALLYRVLPEPVK | 2702 | ABO77783.1 |
| | PERTUSSIS | | | |
| 1820 | BORDETELLA | GLGMAAALGRGHSL | 2703 | ABO77783.1 |
| | PERTUSSIS | | | |
| 1821 | BORDETELLA | GNVIETGGARRFAP | 2704 | ABO77783.1 |
| | PERTUSSIS | | | |
| 1822 | BORDETELLA | GPLDVALASQARWT | 2705 | ABO77783.1 |
| | PERTUSSIS | | | |
| 1823 | BORDETELLA | GQHRLWVRN | 2706 | ABO77783.1 |
| | PERTUSSIS | | | |
| 1824 | BORDETELLA | GRGFAQRQQLDNRA | 2707 | ABO77783.1 |
| | PERTUSSIS | | | |
| 1825 | BORDETELLA | GRLGLEVGKRIELA | 2708 | ABO77783.1 |
| | PERTUSSIS | | | |
| 1826 | BORDETELLA | GRQVQPYIKASVLQ | 2709 | ABO77783.1 |
| | PERTUSSIS | | | |
| 1827 | BORDETELLA | GRRFTHADGWFLEPQAELA | 2710 | ABO77783.1 |
| | PERTUSSIS | | | |
| 1828 | BORDETELLA | GSEPASANTLLLVQ | 2711 | ABO77783.1 |
| | PERTUSSIS | | | |
| 1829 | BORDETELLA | GSSVLGRLGLEVGK | 2712 | ABO77783.1 |
| | PERTUSSIS | | | |
| 1830 | BORDETELLA | GTTIKVSGRQAQGI | 2713 | ABO77783.1 |
| | PERTUSSIS | | | |
| 1831 | BORDETELLA | GTVTVKAGKLVADH | 2714 | ABO77783.1 |
| | PERTUSSIS | | | |
| 1832 | BORDETELLA | HAVAVAGGRWHLGG | 2715 | ABO77783.1 |
| | PERTUSSIS | | | |
| 1833 | BORDETELLA | IELAGGRQVQPYIK | 2716 | ABO77783.1 |
| | PERTUSSIS | | | |
| 1834 | BORDETELLA | IHIQGSDPGGVRTA | 2717 | ABO77783.1 |
| | PERTUSSIS | | | |
| 1835 | BORDETELLA | IRRFLGTVTVKAGK | 2718 | ABO77783.1 |
| | PERTUSSIS | | | |
| 1836 | BORDETELLA | IRVGRGARVTVSGG | 2719 | ABO77783.1 |
| | PERTUSSIS | | | |
| 1837 | BORDETELLA | ITLQAGAHA | 2720 | ABO77783.1 |
| | PERTUSSIS | | | |
| 1838 | BORDETELLA | ITLQAGAHAQGKAL | 2721 | ABO77783.1 |
| | PERTUSSIS | | | |
| 1839 | BORDETELLA | IVEAPELGAAIRVG | 2722 | ABO77783.1 |
| | PERTUSSIS | | | |
| 1840 | BORDETELLA | IVKTGERQHGIHIQ | 2723 | ABO77783.1 |
| | PERTUSSIS | | | |
| 1841 | BORDETELLA | KAGKLVADHATLAN | 2724 | ABO77783.1 |
| | PERTUSSIS | | | |
| 1842 | BORDETELLA | KGKYRTHGVGASLE | 2725 | ABO77783.1 |
| | PERTUSSIS | | | |
| 1843 | BORDETELLA | KPAPQPGPQPPQPP | 2726 | ABO77783.1 |
| | PERTUSSIS | | | |
| 1844 | BORDETELLA | KVAGFELGADHAVA | 2727 | ABO77783.1 |
| | PERTUSSIS | | | |
| 1845 | BORDETELLA | KVAGSDGYAVKGKY | 2728 | ABO77783.1 |
| | PERTUSSIS | | | |
| 1846 | BORDETELLA | KVDIGTYRYRLAAN | 2729 | ABO77783.1 |
| | PERTUSSIS | | | |
| 1847 | BORDETELLA | KVLTVNTLAGSGLF | 2730 | ABO77783.1 |
| | PERTUSSIS | | | |
| 1848 | BORDETELLA | LAANGNGQWSLVGA | 2731 | ABO77783.1 |
| | PERTUSSIS | | | |
| 1849 | BORDETELLA | LAMPWTFHAGYRYS | 2732 | ABO77783.1 |
| | PERTUSSIS | | | |
| 1850 | BORDETELLA | LASTLWYAESNALS | 2733 | ABO77783.1 |
| | PERTUSSIS | | | |
| 1851 | BORDETELLA | LENDFKVAGSDGYA | 2734 | ABO77783.1 |
| | PERTUSSIS | | | |
| 1852 | BORDETELLA | LENPAAELQFRNGS | 2735 | ABO77783.1 |
| | PERTUSSIS | | | |
| 1853 | BORDETELLA | LGAAPAAHADWNNQ | 2736 | ABO77783.1 |
| | PERTUSSIS | | | |
| 1854 | BORDETELLA | LGGLAGYTRGDRGFTGDG | 2737 | ABO77783.1 |
| | PERTUSSIS | | | |
| 1855 | BORDETELLA | LLENP | 2738 | ABO77783.1 |
| | PERTUSSIS | | | |
| 1856 | BORDETELLA | LLVQTPLGSAATFT | 2739 | ABO77783.1 |
| | PERTUSSIS | | | |
| 1857 | BORDETELLA | LPPSRVVLRDTNVT | 2740 | ABO77783.1 |
| | PERTUSSIS | | | |
| 1858 | BORDETELLA | LQPEDLPPS | 2741 | ABO77783.1 |
| | PERTUSSIS | | | |
| 1859 | BORDETELLA | LQPEDLPPSRVVLR | 2742 | ABO77783.1 |
| | PERTUSSIS | | | |
| 1860 | BORDETELLA | LRASRLENDFKVAG | 2743 | ABO77783.1 |
| | PERTUSSIS | | | |
| 1861 | BORDETELLA | LRLASDGSVDFQQP | 2744 | ABO77783.1 |
| | PERTUSSIS | | | |
| 1862 | BORDETELLA | LSAAANAAVNTGGV | 2745 | ABO77783.1 |
| | PERTUSSIS | | | |
| 1863 | BORDETELLA | LSAPHGNVIETGGA | 2746 | ABO77783.1 |
| | PERTUSSIS | | | |
| 1864 | BORDETELLA | LSDDGIRRFLGTVT | 2747 | ABO77783.1 |
| | PERTUSSIS | | | |
| 1865 | BORDETELLA | LVGAKAPPAPKPAP | 2748 | ABO77783.1 |
| | PERTUSSIS | | | |
| 1866 | BORDETELLA | LYVAGEQAQASIAD | 2749 | ABO77783.1 |
| | PERTUSSIS | | | |
| 1867 | BORDETELLA | MALGALGAAPAAHA | 2750 | ABO77783.1 |
| | PERTUSSIS | | | |
| 1868 | BORDETELLA | MNMSLSRIVKAAPL | 2751 | ABO77783.1 |
| | PERTUSSIS | | | |
| 1869 | BORDETELLA | MQDASGQHR | 2752 | ABO77783.1 |
| | PERTUSSIS | | | |
| 1870 | BORDETELLA | MQGAVVHLQRATIR | 2753 | ABO77783.1 |
| | PERTUSSIS | | | |
| 1871 | BORDETELLA | NAAVNTGGVGLAST | 2754 | ABO77783.1 |
| | PERTUSSIS | | | |
| 1872 | BORDETELLA | NALSKRLGELRLNP | 2755 | ABO77783.1 |
| | PERTUSSIS | | | |
| 1873 | BORDETELLA | NGQWSLVGAKAPPA | 2756 | ABO77783.1 |
| | PERTUSSIS | | | |
| 1874 | BORDETELLA | NTLAGSGLFRMNVF | 2757 | ABO77783.1 |
| | PERTUSSIS | | | |
| 1875 | BORDETELLA | PAGRELSAAANAAV | 2758 | ABO77783.1 |
| | PERTUSSIS | | | |
| 1876 | BORDETELLA | PAPQPPAGRELSAA | 2759 | ABO77783.1 |
| | PERTUSSIS | | | |
| 1877 | BORDETELLA | PGPQPPQPPQPQPE | 2760 | ABO77783.1 |
| | PERTUSSIS | | | |
| 1878 | BORDETELLA | PGTSIGPLDVALAS | 2761 | ABO77783.1 |
| | PERTUSSIS | | | |
| 1879 | BORDETELLA | PLGSAATFTLANKD | 2762 | ABO77783.1 |
| | PERTUSSIS | | | |
| 1880 | BORDETELLA | PQPEAPAPQPPAGR | 2763 | ABO77783.1 |
| | PERTUSSIS | | | |
| 1881 | BORDETELLA | PQPPQPQPEAPAPQ | 2764 | ABO77783.1 |
| | PERTUSSIS | | | |
| 1882 | BORDETELLA | PYIKASVLQEFDGA | 2765 | ABO77783.1 |
| | PERTUSSIS | | | |
| 1883 | BORDETELLA | RFAPQAAPLSITLQ | 2766 | ABO77783.1 |
| | PERTUSSIS | | | |
| 1884 | BORDETELLA | RLGELRLNPDAGGA | 2767 | ABO77783.1 |
| | PERTUSSIS | | | |
| 1885 | BORDETELLA | RLNPDAGGAWGRGF | 2768 | ABO77783.1 |
| | PERTUSSIS | | | |
| 1886 | BORDETELLA | RNGSVTSSGQLSDD | 2769 | ABO77783.1 |
| | PERTUSSIS | | | |
| 1887 | BORDETELLA | RRFDQKVAGFELGA | 2770 | ABO77783.1 |
| | PERTUSSIS | | | |
| 1888 | BORDETELLA | RTTLAMALGALGAA | 2771 | ABO77783.1 |
| | PERTUSSIS | | | |
| 1889 | BORDETELLA | SAIVDGGLHIGALQ | 2772 | ABO77783.1 |
| | PERTUSSIS | | | |
| 1890 | BORDETELLA | SANTLLLVQTPLGS | 2773 | ABO77783.1 |
| | PERTUSSIS | | | |
| 1891 | BORDETELLA | SDPGGVRTASGTTI | 2774 | ABO77783.1 |
| | PERTUSSIS | | | |
| 1892 | BORDETELLA | SELTLDGGHITGGR | 2775 | ABO77783.1 |
| | PERTUSSIS | | | |
| 1893 | BORDETELLA | SGLFRMNVF | 2776 | ABO77783.1 |
| | PERTUSSIS | | | |
| 1894 | BORDETELLA | SGLFRMNVFADLGL | 2777 | ABO77783.1 |
| | PERTUSSIS | | | |
| 1895 | BORDETELLA | SGSSVELAQSIVEA | 2778 | ABO77783.1 |
| | PERTUSSIS | | | |
| 1896 | BORDETELLA | SIADSTLQGAGGVQ | 2779 | ABO77783.1 |
| | PERTUSSIS | | | |
| 1897 | BORDETELLA | SKGPKLAMPWTFHA | 2780 | ABO77783.1 |
| | PERTUSSIS | | | |
| 1898 | BORDETELLA | SNVGALRLASDGSV | 2781 | ABO77783.1 |
| | PERTUSSIS | | | |
| 1899 | BORDETELLA | SRIVKAAPLRRTTL | 2782 | ABO77783.1 |
| | PERTUSSIS | | | |
| 1900 | BORDETELLA | SVLGASELTLDGGH | 2783 | ABO77783.1 |
| | PERTUSSIS | | | |
| 1901 | BORDETELLA | SVLQEFDGA | 2784 | ABO77783.1 |
| | PERTUSSIS | | | |
| 1902 | BORDETELLA | SVLQEFDGAGTVHT | 2785 | ABO77783.1 |
| | PERTUSSIS | | | |
| 1903 | BORDETELLA | TELR | 2786 | ABO77783.1 |
| | PERTUSSIS | | | |
| 1904 | BORDETELLA | TELRGTRAELGLGM | 2787 | ABO77783.1 |
| | PERTUSSIS | | | |
| 1905 | BORDETELLA | TGDGGGHTDSVHVG | 2788 | ABO77783.1 |
| | PERTUSSIS | | | |
| 1906 | BORDETELLA | TGGARRFAPQAAPL | 2789 | ABO77783.1 |
| | PERTUSSIS | | | |
| 1907 | BORDETELLA | TGGRAAGVAAMQGA | 2790 | ABO77783.1 |
| | PERTUSSIS | | | |
| 1908 | BORDETELLA | TGGVGLASTLWYAE | 2791 | ABO77783.1 |
| | PERTUSSIS | | | |
| 1990 | BORDETELLA | THGVGASLEAGRRF | 2792 | ABO77783.1 |
| | PERTUSSIS | | | |
| 1910 | BORDETELLA | TIRRGDAPA | 2793 | ABO77783.1 |
| | PERTUSSIS | | | |
| 1911 | BORDETELLA | TLANVGDTWDDDGI | 2794 | ABO77783.1 |
| | PERTUSSIS | | | |
| 1912 | BORDETELLA | TLQGAGGVQIERGA | 2795 | ABO77783.1 |
| | PERTUSSIS | | | |
| 1913 | BORDETELLA | TLTGGADAQGDIVA | 2796 | ABO77783.1 |
| | PERTUSSIS | | | |
| 1914 | BORDETELLA | TNVTAVPASGAPAA | 2797 | ABO77783.1 |
| | PERTUSSIS | | | |
| 1915 | BORDETELLA | TRAELGLGMAAALG | 2798 | ABO77783.1 |
| | PERTUSSIS | | | |
| 1916 | BORDETELLA | TSSGQLSDDGIRRF | 2799 | ABO77783.1 |
| | PERTUSSIS | | | |
| 1917 | BORDETELLA | TVHTNGIAHRTELR | 2800 | ABO77783.1 |
| | PERTUSSIS | | | |
| 1918 | BORDETELLA | TYRYRLAANGNGQW | 2801 | ABO77783.1 |
| | PERTUSSIS | | | |
| 1919 | BORDETELLA | VADHATLANVGDTW | 2802 | ABO77783.1 |
| | PERTUSSIS | | | |
| 1920 | BORDETELLA | VHVGGYATYIADSG | 2803 | ABO77783.1 |
| | PERTUSSIS | | | |
| 1921 | BORDETELLA | VLDGWYGVD | 2804 | ABO77783.1 |
| | PERTUSSIS | | | |
| 1922 | BORDETELLA | VPASGAPAAVSVLG | 2805 | ABO77783.1 |
| | PERTUSSIS | | | |
| 1923 | BORDETELLA | VRDEGGSSVLGRLG | 2806 | ABO77783.1 |
| | PERTUSSIS | | | |
| 1924 | BORDETELLA | VRTASGTTIKVSGR | 2807 | ABO77783.1 |
| | PERTUSSIS | | | |
| 1925 | BORDETELLA | VSGGSLSAPHGNVI | 2808 | ABO77783.1 |
| | PERTUSSIS | | | |
| 1926 | BORDETELLA | VSGRQAQGILLENP | 2809 | ABO77783.1 |
| | PERTUSSIS | | | |
| 1927 | BORDETELLA | VTVQRSAIVDGGLH | 2810 | ABO77783.1 |
| | PERTUSSIS | | | |
| 1928 | BORDETELLA | VVLRDTNVTAVPAS | 2811 | ABO77783.1 |
| | PERTUSSIS | | | |
| 1929 | BORDETELLA | WNNQSIVKTGERQH | 2812 | ABO77783.1 |
| | PERTUSSIS | | | |
| 1930 | BORDETELLA | WVRNSGSEPASANT | 2813 | ABO77783.1 |
| | PERTUSSIS | | | |
| 1931 | BORDETELLA | WYAESNALSKRLGE | 2814 | ABO77783.1 |
| | PERTUSSIS | | | |
| 1932 | BORDETELLA | YATYIADSGFYLDA | 2815 | ABO77783.1 |
| | PERTUSSIS | | | |
| 1933 | BORDETELLA | YGVDVSGSS | 2816 | ABO77783.1 |
| | PERTUSSIS | | | |
| 1934 | BORDETELLA | YGVDVSGSSVELAQ | 2817 | ABO77783.1 |
| | PERTUSSIS | | | |
| 1935 | BORDETELLA | YLDATLRASRLEND | 2818 | ABO77783.1 |
| | PERTUSSIS | | | |
| 1936 | BORDETELLA | YRVLPEPVKLTLTG | 2819 | ABO77783.1 |
| | PERTUSSIS | | | |
| 1937 | BORDETELLA | VKAQNITNKRAALIEA | 2820 | AAA22974.1 |
| | PERTUSSIS | | | |
| 1938 | BORDETELLA | YYSNVTATRLLSSTNS | 2821 | AAA83981.1 |
| | PERTUSSIS | | | |
| 1939 | BORDETELLA | SPNLTDERAAQAGVT | 2822 | CPP72976.1 |
| | PERTUSSIS | | | |
| 1940 | MEASLES | SSRASDERAAHLPTS | 2823 | BAA33867.1 |
| | MORBILLIVIRUS | | | |
| 1941 | CORYNEBACTERIUM | QVVHNSYNRPAYSPG | 2824 | 1007216A |
| | DIPHTHERIAE | | | |
| 1942 | MEASLES VIRUS | AEGGEIHEL | 2825 | AAF85692.1 |
| | STRAIN | | | |
| | EDMONSTON-B | | | |
| 1943 | MISEASLES VIRUS | AENLISNGIGKY | 2826 | AAF85698.1 |
| | STRAIN | | | |
| | EDMONSTON-B | | | |
| 1944 | MISEASLES VIRUS | AEVDGDVKL | 2827 | CAB43772.1 |
| | STRAIN | | | |
| | EDMONSTON-B | | | |
| 1945 | MISEASLES VIRUS | AIYTAEIHK | 2828 | AAF85697.1 |
| | STRAIN | | | |
| | EDMONSTON-B | | | |
| 1946 | MISEASLES VIRUS | APVFHMTNY | 2829 | CAB43772.1 |
| | STRAIN | | | |
| | EDMONSTON-B | | | |
| 1947 | MISEASLES VIRUS | APVFHMTNYLEQPVSN | 2830 | AAR89413.1 |
| | STRAIN | | | |
| | EDMONSTON-B | | | |
| 1948 | MISEASLES VIRUS | AQRLNEIY | 2831 | AAF85698.1 |
| | STRAIN | | | |
| | EDMONSTON-B | | | |
| 1949 | MISEASLES VIRUS | ARVPHAYSL | 2832 | AAF85698.1 |
| | STRAIN | | | |
| | EDMONSTON-B | | | |
| 1950 | MISEASLES VIRUS | AVRDLERAM | 2833 | P03424.1 |
| | STRAIN | | | |
| | EDMONSTON-B | | | |
| 1951 | MISEASLES VIRUS | AVRDLERAMTTLK | 2834 | P03424.1 |
| | STRAIN | | | |
| | EDMONSTON-B | | | |
| 1952 | MISEASLES VIRUS | DALLRLQAM | 2835 | Q89933.1 |
| | STRAIN | | | |
| | EDMONSTON-B | | | |
| 1953 | MISEASLES VIRUS | DIKEKVINL | 2836 | AAF85698.1 |
| | STRAIN | | | |
| | EDMONSTON-B | | | |
| 1954 | MISEASLES VIRUS | DQGLFKVL | 2837 | AAF85695.1 |
| | STRAIN | | | |
| | EDMONSTON-B | | | |
| 1955 | MISEASLES VIRUS | DTGVDTRIW | 2838 | Q9EMA9.1 |
| | STRAIN | | | |
| | EDMONSTON-B | | | |
| 1956 | MISEASLES VIRUS | EPIGSLAIEEAM | 2839 | AAF85692.1 |
| | STRAIN | | | |
| | EDMONSTON-B | | | |
| 1957 | MISEASLES VIRUS | EPIRDALNAM | 2840 | P69354.1 |
| | STRAIN | | | |
| | EDMONSTON-B | | | |
| 1958 | MISEASLES VIRUS | FPKLGKTL | 2841 | AAF85692.1 |
| | STRAIN | | | |
| | EDMONSTON-B | | | |
| 1959 | MISEASLES VIRUS | FRSVNAVAF | 2842 | AAF85695.1 |
| | STRAIN | | | |
| | EDMONSTON-B | | | |
| 1960 | MISEASLES VIRUS | GKIIDNTEQL | 2843 | AAF85695.1 |
| | STRAIN | | | |
| | EDMONSTON-B | | | |
| 1961 | MISEASLES VIRUS | GLNEKLVFY | 2844 | AAF85695.1 |
| | STRAIN | | | |
| | EDMONSTON-B | | | |
| 1962 | MISEASLES VIRUS | GMYGGTYLVEK | 2845 | AAC35876.2 |
| | STRAIN | | | |
| | EDMONSTON-B | | | |
| 1963 | MISEASLES VIRUS | GPPISLERLDVGTN | 2846 | P69354.1 |
| | STRAIN | | | |
| | EDMONSTON-B | | | |
| 1964 | MISEASLES VIRUS | GPRQAQVSFL | 2847 | Q89933.1 |
| | STRAIN | | | |
| | EDMONSTON-B | | | |
| 1965 | MISEASLES VIRUS | GRLVPQVRVID | 2848 | AAF85695.1 |
| | STRAIN | | | |
| | EDMONSTON-B | | | |
| 1966 | MISEASLES VIRUS | GSAPISMGFR | 2849 | AAF85692.1 |
| | STRAIN | | | |
| | EDMONSTON-B | | | |
| 1967 | MISEASLES VIRUS | HILAKSTAL | 2850 | AAF85698.1 |
| | STRAIN | | | |
| | EDMONSTON-B | | | |
| 1968 | MISEASLES VIRUS | HYREVNLVY | 2851 | AAF85698.1 |
| | STRAIN | | | |
| | EDMONSTON-B | | | |
| 1969 | MISEASLES VIRUS | IPPMKNLAL | 2852 | AAC35876.2 |
| | STRAIN | | | |
| | EDMONSTON-B | | | |
| 1970 | MISEASLES VIRUS | IPYQGSGKGVSF | 2853 | CAB43772.1 |
| | STRAIN | | | |
| | EDMONSTON-B | | | |
| 1971 | MISEASLES VIRUS | ISKESQHVY | 2854 | AAF85698.1 |
| | STRAIN | | | |
| | EDMONSTON-B | | | |
| 1972 | MISEASLES VIRUS | IVSSHFFVY | 2855 | AAF85698.1 |
| | STRAIN | | | |
| | EDMONSTON-B | | | |
| 1973 | MISEASLES VIRUS | KEIKETGRLF | 2856 | AAF85698.1 |
| | STRAIN | | | |
| | EDMONSTON-B | | | |
| 1974 | MISEASLES VIRUS | KESQHVYYL | 2857 | AAF85698.1 |
| | STRAIN | | | |
| | EDMONSTON-B | | | |
| 1975 | MISEASLES VIRUS | KIIDNTEQL | 2858 | AAF85695.1 |
| | STRAIN | | | |
| | EDMONSTON-B | | | |
| 1976 | MISEASLES VIRUS | KKQINRQN | 2859 | AAA63285.1 |
| | STRAIN | | | |
| | EDMONSTON-B | | | |
| 1977 | MISEASLES VIRUS | KKVDTNFIYQ | 2860 | AAF85698.1 |
| | STRAIN | | | |
| | EDMONSTON-B | | | |
| 1978 | MISEASLES VIRUS | KLIDGFFPA | 2861 | AAF85698.1 |
| | STRAIN | | | |
| | EDMONSTON-B | | | |
| 1979 | MISEASLES VIRUS | KPNLSSKRSEL | 2862 | BAB39848.1 |
| | STRAIN | | | |
| | EDMONSTON-B | | | |
| 1980 | MISEASLES VIRUS | KVSPYLFTV | 2863 | AAR89413.1 |
| | STRAIN | | | |
| | EDMONSTON-B | | | |
| 1981 | MISEASLES VIRUS | LETRTTNQFL | 2864 | CAB43772.1 |
| | STRAIN | | | |
| | EDMONSTON-B | | | |
| 1982 | MISEASLES VIRUS | LLKEATEL | 2865 | AAF85695.1 |
| | STRAIN | | | |
| | EDMONSTON-B | | | |
| 1983 | MISEASLES VIRUS | LLKKGNSLY | 2866 | AAF85698.1 |
| | STRAIN | | | |
| | EDMONSTON-B | | | |
| 1984 | MISEASLES VIRUS | LPAPIGGMNY | 2867 | AAF85698.1 |
| | STRAIN | | | |
| | EDMONSTON-B | | | |
| 1985 | MISEASLES VIRUS | MPEETLHQVM | 2868 | AAF85698.1 |
| | STRAIN | | | |
| | EDMONSTON-B | | | |
| 1986 | MISEASLES VIRUS | PTTIRGQFS | 2869 | CAB43772.1 |
| | STRAIN | | | |
| | EDMONSTON-B | | | |
| 1987 | MISEASLES VIRUS | QEISRHQALGY | 2870 | P03424.1 |
| | STRAIN | | | |
| | EDMONSTON-B | | | |
| 1988 | MISEASLES VIRUS | RITHVDTESY | 2871 | P69354.1 |
| | STRAIN | | | |
| | EDMONSTON-B | | | |
| 1989 | MISEASLES VIRUS | RPGLKPDL | 2872 | P69354.1 |
| | STRAIN | | | |
| | EDMONSTON-B | | | |
| 1990 | MISEASLES VIRUS | RPIYGLEV | 2873 | AAF85698.1 |
| | STRAIN | | | |
| | EDMONSTON-B | | | |
| 1991 | MISEASLES VIRUS | RQAGQEMILAV | 2874 | P69354.1 |
| | STRAIN | | | |
| | EDMONSTON-B | | | |
| 1992 | MISEASLES VIRUS | SAVRIATVY | 2875 | AAF85698.1 |
| | STRAIN | | | |
| | EDMONSTON-B | | | |
| 1993 | MISEASLES VIRUS | SLMPEETLHQV | 2876 | AAF85698.1 |
| | STRAIN | | | |
| | EDMONSTON-B | | | |
| 1994 | MISEASLES VIRUS | SMIDLVTKF | 2877 | AAF85698.1 |
| | STRAIN | | | |
| | EDMONSTON-B | | | |
| 1995 | MISEASLES VIRUS | SMLNSQAIDNLRA | 2878 | P69354.1 |
| | STRAIN | | | |
| | EDMONSTON-B | | | |
| 1996 | MISEASLES VIRUS | SMYRVFEV | 2879 | CAB43772.1 |
| | STRAIN | | | |
| | EDMONSTON-B | | | |
| 1997 | MISEASLES VIRUS | SQQGMFHAY | 2880 | AAF85698.1 |
| | STRAIN | | | |
| | EDMONSTON-B | | | |
| 1998 | MISEASLES VIRUS | TDTPIVYNDRNLLD | 2881 | Q89933.1 |
| | STRAIN | | | |
| | EDMONSTON-B | | | |
| 1999 | MISEASLES VIRUS | VIINDDQGLFKV | 2882 | AAF85695.1 |
| | STRAIN | | | |
| | EDMONSTON-B | | | |
| 2000 | MISEASLES VIRUS | YESGVRIASL | 2883 | AAF85698.1 |
| | STRAIN | | | |
| | EDMONSTON-B | | | |
| 2001 | MISEASLES VIRUS | YLKDKALA | 2884 | AAF85698.1 |
| | STRAIN | | | |
| | EDMONSTON-B | | | |
| 2002 | MISEASLES VIRUS | YVYDHSGEAVK | 2885 | AAF85692.1 |
| | STRAIN | | | |
| | EDMONSTON-B | | | |
| 2003 | RUBELLA VIRUS | ARVIDPAAQSFTGVV | 2886 | BAA28178.1 |
| 2004 | RUBELLA VIRUS | SDRASARVIDPAAQS | 2887 | BAA28178.1 |
| 2005 | RUBELLA VIRUS | VPPGKFVTAALLNTP | 2888 | BAA28178.1 |
| 2006 | RUBELLA VIRUS | WVTPVIGSQARKCGL | 2889 | BAA28178.1 |
| 2007 | MUMPS | GTYRLIPNARANLTA | 400 | AGC97176.1 |
| | RUBULAVIRUS | | | |

[0822] I. Delivery of Prime Editors

[0823] In another aspect, the present disclosure provides for the delivery of prime editors in vitro and in vivo using various strategies, including on separate vectors using split inteins and as well as direct delivery strategies of the ribonucleoprotein complex (i.e., the prime editor complexed to the PEgRNA and/or the second-site gRNA) using techniques such as electroporation, use of cationic lipid-mediated formulations, and induced endocytosis methods using receptor ligands fused to the ribonucleotprotein complexes. Any such methods are contemplated herein.

### Overview of Delivery Options

[0824] In some aspects, the invention provides methods comprising delivering one or more prime editor-encoding polynucleotides, such as or one or more vectors as described herein encoding one or more components of the prime editing system described herein, one or more transcripts thereof, and/or one or proteins transcribed therefrom, to a host cell. In some aspects, the invention further provides cells produced by such methods, and organisms (such as animals, plants, or fungi) comprising or produced from such cells. In some embodiments, a prime editor as described herein in combination with (and optionally complexed with) a guide sequence is delivered to a cell. Conventional viral and non-viral based gene transfer methods can be used to introduce nucleic acids in mammalian cells or target tissues. Such methods can be used to administer nucleic acids encoding components of a prime editor to cells in culture, or in a host organism. Non-viral vector delivery systems include DNA plasmids, RNA (e.g. a transcript of a vector described herein), naked nucleic acid, and nucleic acid complexed with a delivery vehicle, such as a liposome. Viral vector delivery systems include DNA and RNA viruses, which have either episomal or integrated genomes after delivery to the cell. For a review of gene therapy procedures, see Anderson, Science 256:808-813 (1992); Nabel & Felgner, TIBTECH 11:211-217 (1993); Mitani & Caskey, TIBTECH 11:162-166 (1993); Dillon, TIBTECH 11:167-175 (1993); Miller, Nature 357:455-460 (1992); Van Brunt, Biotechnology 6(10):1149-1154 (1988); Vigne, Restorative Neurology and Neuroscience 8:35-36 (1995); Kremer & Perricaudet, British Medical Bulletin 51(1):31-44 (1995); Haddada et al., in Current Topics in Microbiology and Immunology Doerfler and Bihm (eds) (1995); and Yu et al., Gene Therapy 1:13-26 (1994).

[0825] Methods of non-viral delivery of nucleic acids include lipofection, nucleofection, microinjection, biolistics, virosomes, liposomes, immunoliposomes, polycation or lipid:nucleic acid conjugates, naked DNA, artificial virions, and agent-enhanced uptake of DNA. Lipofection is described in e.g., U.S. Pat. Nos. 5,049,386, 4,946,787; and 4,897,355) and lipofection reagents are sold commercially (e.g., Transfectam™ and Lipofectin™) Cationic and neutral lipids that are suitable for efficient receptor-recognition lipofection of polynucleotides include those of Feigner, WO 91/17424; WO 91/16024. Delivery can be to cells (e.g. in vitro or ex vivo administration) or target tissues (e.g. in vivo administration).

[0826] The preparation of lipid:nucleic acid complexes, including targeted liposomes such as immunolipid complexes, is well known to one of skill in the art (see, e.g., Crystal, Science 270:404-410 (1995); Blaese et al., Cancer Gene Ther. 2:291-297 (1995); Behr et al., Bioconjugate Chem. 5:382-389 (1994); Remy et al., Bioconjugate Chem. 5:647-654 (1994); Gao et al., Gene Therapy 2:710-722 (1995); Ahmad et al., Cancer Res. 52:4817-4820 (1992); U.S. Pat. Nos. 4,186,183, 4,217,344, 4,235,871, 4,261,975, 4,485,054, 4,501,728, 4,774,085, 4,837,028, and 4,946,787).

[0827] The use of RNA or DNA viral based systems for the delivery of nucleic acids take advantage of highly evolved processes for targeting a virus to specific cells in the body and trafficking the viral payload to the nucleus. Viral vectors can be administered directly to patients (in vivo) or they can be used to treat cells in vitro, and the modified cells may optionally be administered to patients (ex vivo). Conventional viral based systems could include retroviral, lentivirus, adenoviral, adeno-associated and herpes simplex virus vectors for gene transfer. Integration in the host genome is possible with the retrovirus, lentivirus, and adeno-associated virus gene transfer methods, often resulting in long term expression of the inserted transgene. Additionally, high transduction efficiencies have been observed in many different cell types and target tissues.

[0828] The tropism of a viruses can be altered by incorporating foreign envelope proteins, expanding the potential target population of target cells. Lentiviral vectors are retroviral vectors that are able to transduce or infect non-dividing cells and typically produce high viral titers. Selection of a retroviral gene transfer system would therefore depend on the target tissue. Retroviral vectors are comprised of cis-acting long terminal repeats with packaging capacity for up to 6-10 kb of foreign sequence. The minimum cis-acting LTRs are sufficient for replication and packaging of the vectors, which are then used to integrate the therapeutic gene into the target cell to provide permanent transgene expression. Widely used retroviral vectors include those based upon murine leukemia virus (MuLV), gibbon ape leukemia virus (GaLV), Simian Immuno deficiency virus (SIV), human immuno deficiency virus (HIV), and combinations thereof (see, e.g., Buchscher et al., J. Virol. 66:2731-2739 (1992); Johann et al., J. Virol. 66:1635-1640 (1992); Sommnerfelt et al., Virol. 176:58-59 (1990); Wilson et al., J. Virol. 63:2374-2378 (1989); Miller et al., J. Virol. 65:2220-2224 (1991); PCT/US94/05700). In applications where transient expression is preferred, adenoviral based systems may be used. Adenoviral based vectors are capable of very high transduction efficiency in many cell types and do not require cell division. With such vectors, high titer and levels of expression have been obtained. This vector can be produced in large quantities in a relatively simple system. Adeno-associated virus (“AAV”) vectors may also be used to transduce cells with target nucleic acids, e.g., in the in vitro production of nucleic acids and peptides, and for in vivo and ex vivo gene therapy procedures (see, e.g., West et al., Virology 160:38-47 (1987); U.S. Pat. No. 4,797,368; WO 93/24641; Kotin, Human Gene Therapy 5:793-801 (1994); Muzyczka, J. Clin. Invest. 94:1351 (1994). Construction of recombinant AAV vectors are described in a number of publications, including U.S. Pat. No. 5,173,414; Tratschin et al., Mol. Cell. Biol. 5:3251-3260 (1985); Tratschin, et al., Mol. Cell. Biol. 4:2072-2081 (1984); Hermonat & Muzyczka, PNAS 81:6466-6470 (1984); and Samulski et al., J. Virol. 63:03822-3828 (1989).

[0829] Packaging cells are typically used to form virus particles that are capable of infecting a host cell. Such cells include 293 cells, which package adenovirus, and W2 cells or PA317 cells, which package retrovirus. Viral vectors used in gene therapy are usually generated by producing a cell line that packages a nucleic acid vector into a viral particle. The vectors typically contain the minimal viral sequences required for packaging and subsequent integration into a host, other viral sequences being replaced by an expression cassette for the polynucleotide(s) to be expressed. The missing viral functions are typically supplied in trans by the packaging cell line. For example, AAV vectors used in gene therapy typically only possess ITR sequences from the AAV genome which are required for packaging and integration into the host genome. Viral DNA is packaged in a cell line, which contains a helper plasmid encoding the other AAV genes, namely rep and cap, but lacking ITR sequences. The cell line may also be infected with adenovirus as a helper. The helper virus promotes replication of the AAV vector and expression of AAV genes from the helper plasmid. The helper plasmid is not packaged in significant amounts due to a lack of ITR sequences. Contamination with adenovirus can be reduced by, e.g., heat treatment to which adenovirus is more sensitive than AAV. Additional methods for the delivery of nucleic acids to cells are known to those skilled in the art. See, for example, US20030087817, incorporated herein by reference.

[0830] In various embodiments, the PE constructs (including, the split-constructs) may be engineered for delivery in one or more rAAV vectors. An rAAV as related to any of the methods and compositions provided herein may be of any serotype including any derivative or pseudotype (e.g., 1, 2, 3, 4, 5, 6, 7, 8, 9, 10, 11, 12, 13, 2/1, 2/5, 2/8, 2/9, 3/1, 3/5, 3/8, or 3/9). An rAAV may comprise a genetic load (i.e., a recombinant nucleic acid vector that expresses a gene of interest, such as a whole or split PE fusion protein that is carried by the rAAV into a cell) that is to be delivered to a cell. An rAAV may be chimeric.

[0831] As used herein, the serotype of an rAAV refers to the serotype of the capsid proteins of the recombinant virus. Non-limiting examples of derivatives and pseudotypes include rAAV2/1, rAAV2/5, rAAV2/8, rAAV2/9, AAV2-AAV3 hybrid, AAVrh.10, AAVhu.14, AAV3a/3b, AAVrh32.33, AAV-HSC15, AAV-HSC17, AAVhu.37, AAVrh.8, CHt-P6, AAV2.5, AAV6.2, AAV2i8, AAV-HSC15/17, AAVM41, AAV9.45, AAV6(Y445F/Y731F), AAV2.5T, AAV-HAE1/2, AAV clone 32/83, AAVShH10, AAV2 (Y->F), AAV8 (Y733F), AAV2.15, AAV2.4, AAVM41, and AAVr3.45. A non-limiting example of derivatives and pseudotypes that have chimeric VP1 proteins is rAAV2/5-1VP1u, which has the genome of AAV2, capsid backbone of AAV5 and VP1u of AAV1. Other non-limiting example of derivatives and pseudotypes that have chimeric VP1 proteins are rAAV2/5-8VP1u, rAAV2/9-1VP1u, and rAAV2/9-8VP1u.

[0832] AAV derivatives/pseudotypes, and methods of producing such derivatives/pseudotypes are known in the art (see, e.g., Mol Ther. 2012 April; 20(4):699-708. doi: 10.1038/mt.2011.287. Epub 2012 Jan. 24. The AAV vector toolkit: poised at the clinical crossroads. Asokan A1, Schaffer D V, Samulski R J.). Methods for producing and using pseudotyped rAAV vectors are known in the art (see, e.g., Duan et al., J. Virol., 75:7662-7671, 2001; Halbert et al., J. Virol., 74:1524-1532, 2000; Zolotukhin et al., Methods, 28:158-167, 2002; and Auricchio et al., Hum. Molec. Genet., 10:3075-3081, 2001).

[0833] Methods of making or packaging rAAV particles are known in the art and reagents are commercially available (see, e.g., Zolotukhin et al. Production and purification of serotype 1, 2, and 5 recombinant adeno-associated viral vectors. Methods 28 (2002) 158-167; and U.S. Patent Publication Numbers US20070015238 and US20120322861, which are incorporated herein by reference; and plasmids and kits available from ATCC and Cell Biolabs, Inc.). For example, a plasmid comprising a gene of interest may be combined with one or more helper plasmids, e.g., that contain a rep gene (e.g., encoding Rep78, Rep68, Rep52 and Rep40) and a cap gene (encoding VP1, VP2, and VP3, including a modified VP2 region as described herein), and transfected into a recombinant cells such that the rAAV particle can be packaged and subsequently purified.

[0834] Recombinant AAV may comprise a nucleic acid vector, which may comprise at a minimum: (a) one or more heterologous nucleic acid regions comprising a sequence encoding a protein or polypeptide of interest or an RNA of interest (e.g., a siRNA or microRNA), and (b) one or more regions comprising inverted terminal repeat (ITR) sequences (e.g., wild-type ITR sequences or engineered ITR sequences) flanking the one or more nucleic acid regions (e.g., heterologous nucleic acid regions). Herein, heterologous nucleic acid regions comprising a sequence encoding a protein of interest or RNA of interest are referred to as genes of interest.

[0835] Any one of the rAAV particles provided herein may have capsid proteins that have amino acids of different serotypes outside of the VP1u region. In some embodiments, the serotype of the backbone of the VP1 protein is different from the serotype of the ITRs and/or the Rep gene. In some embodiments, the serotype of the backbone of the VP1 capsid protein of a particle is the same as the serotype of the ITRs. In some embodiments, the serotype of the backbone of the VP1 capsid protein of a particle is the same as the serotype of the Rep gene. In some embodiments, capsid proteins of rAAV particles comprise amino acid mutations that result in improved transduction efficiency.

[0836] In some embodiments, the nucleic acid vector comprises one or more regions comprising a sequence that facilitates expression of the nucleic acid (e.g., the heterologous nucleic acid), e.g., expression control sequences operatively linked to the nucleic acid. Numerous such sequences are known in the art. Non-limiting examples of expression control sequences include promoters, insulators, silencers, response elements, introns, enhancers, initiation sites, termination signals, and poly(A) tails. Any combination of such control sequences is contemplated herein (e.g., a promoter and an enhancer).

[0837] Final AAV constructs may incorporate a sequence encoding the PEgRNA. In other embodiments, the AAV constructs may incorporate a sequence encoding the second-site nicking guide RNA. In still other embodiments, the AAV constructs may incorporate a sequence encoding the second-site nicking guide RNA and a sequence encoding the PEgRNA.

[0838] In various embodiments, the PEgRNAs and the second-site nicking guide RNAs can be expressed from an appropriate promoter, such as a human U6 (hU6) promoter, a mouse U6 (mU6) promoter, or other appropriate promoter. The PEgRNAs and the second-site nicking guide RNAs can be driven by the same promoters or different promoters.

[0839] In some embodiments, a rAAV constructs or the herein compositions are administered to a subject enterally. In some embodiments, a rAAV constructs or the herein compositions are administered to the subject parenterally. In some embodiments, a rAAV particle or the herein compositions are administered to a subject subcutaneously, intraocularly, intravitreally, subretinally, intravenously (IV), intracerebro-ventricularly, intramuscularly, intrathecally (IT), intracisternally, intraperitoneally, via inhalation, topically, or by direct injection to one or more cells, tissues, or organs. In some embodiments, a rAAV particle or the herein compositions are administered to the subject by injection into the hepatic artery or portal vein.

### Split PE Vector-Based Strategies

[0840] In this aspect, the prime editors can be divided at a split site and provided as two halves of a whole/complete prime editor. The two halves can be delivered to cells (e.g., as expressed proteins or on separate expression vectors) and once in contact inside the cell, the two halves form the complete prime editor through the self-splicing action of the inteins on each prime editor half. Split intein sequences can be engineered into each of the halves of the encoded prime editor to facilitate their transplicing inside the cell and the concomitant restoration of the complete, functioning PE.

[0841] These split intein-based methods overcome several barriers to in vivo delivery. For example, the DNA encoding prime editors is larger than the rAAV packaging limit, and so requires special solutions. One such solution is formulating the editor fused to split intein pairs that are packaged into two separate rAAV particles that, when co-delivered to a cell, reconstitute the functional editor protein. Several other special considerations to account for the unique features of prime editing are described, including the optimization of second-site nicking targets and properly packaging prime editors into virus vectors, including lentiviruses and rAAV.

[0842] In this aspect, the prime editors can be divided at a split site and provided as two halves of a whole/complete prime editor. The two halves can be delivered to cells (e.g., as expressed proteins or on separate expression vectors) and once in contact inside the cell, the two halves form the complete prime editor through the self-splicing action of the inteins on each prime editor half. Split intein sequences can be engineered into each of the halves of the encoded prime editor to facilitate their transplicing inside the cell and the concomitant restoration of the complete, functioning PE.

[0843] FIG. 66 depicts one embodiment of a prime editor being provided as two PE half proteins which regenerate as whole prime editor through the self-splicing action of the split-intein halves located at the end or beginning of each of the prime editor half proteins. As used herein, the term “PE N-terminal half” refers to the N-terminal half of a complete prime editor and which comprises the “N intein” at the C-terminal end of the PE N-terminal half (i.e., the N-terminal extein) of the complete prime editor. The “N intein” refers to the N-terminal half of a complete, fully-formed split-intein moiety. As used herein, the term “PE C-terminal half” refers to the C-terminal half of a complete prime editor and which comprises the “C intein” at the N-terminal end of the C-terminal half (i.e., the C-terminal extein) of a complete prime editor. When the two half proteins, i.e., the PE N-terminal half and the PE C-terminal half, come into contact with one another, e.g., within the cell, the N intein and the C intein undergo the simultaneous process of self-excision and the formation of a peptide bond between the C-terminal end of the PE N-terminal half and the N-terminal end of the PE C-terminal half to reform the complete prime editor protein comprising the complete napDNAbp domain (e.g., Cas9 nickase) and the RT domain. Although not shown in the drawing, the prime editor may also comprise additional sequences including NLS at the N-terminus and/or C-terminus, as well as amino acid linkers sequences joining each domain.

[0844] In various embodiments, the prime editors may be engineered as two half proteins (i.e., a PE N-terminal half and a PE C-terminal half) by “splitting” the whole prime editor as a “split site.” The “split site” refers to the location of insertion of split intein sequences (i.e., the N intein and the C intein) between two adjacent amino acid residues in the prime editor. More specifically, the “split site” refers to the location of dividing the whole prime editor into two separate halves, wherein in each halve is fused at the split site to either the N intein or the C intein motifs. The split site can be at any suitable location in the prime editor fusion protein, but preferably the split site is located at a position that allows for the formation of two half proteins which are appropriately sized for delivery (e.g., by expression vector) and wherein the inteins, which are fused to each half protein at the split site termini, are available to sufficiently interact with one another when one half protein contacts the other half protein inside the cell.

[0845] In some embodiments, the split site is located in the napDNAbp domain. In other embodiments, the split site is located in the RT domain. In other embodiments, the split site is located in a linker that joins the napDNAbp domain and the RT domain.

[0846] In various embodiments, split site design requires finding sites to split and insert an N- and C-terminal intein that are both structurally permissive for purposes of packaging the two half prime editor domains into two different AAV genomes. Additionally, intein residues necessary for trans splicing can be incorporated by mutating residues at the N terminus of the C terminal extein or inserting residues that will leave an intein “scar.”

[0847] Exemplary split configurations of split prime editors comprising either the SpCas9 nickase or the SaCas9 nickase are as follows.

S. PYOGENES PE, SPLIT AT LINKER, N TERMINAL PORTION
STRUCTURE:[N EXTEIN]−[N INTEIN]
(SEQ ID NO: 443)
MKRTADGSEFESPKKKRKVDKKYSIGLDIGTNSVGWAVITDEYKVPSKKFKVLG
NTDRHSIKKNLIGALLFDSGETAEATRLKRTARRRYTRRKNRICYLQEIFSNEM
AKVDDSFFHRLEESFLVEEDKKHERHPIFGNIVDEVAYHEKYPTIYHLRKKLVD
STDKADLRLIYLALAHMIKFRGHFLIEGDLNPDNSDVDKLFIQLVQTYNQLFE
ENPINASGVDAKAILSARLSKSRRLENLIAQLPGEKKNGLFGNLIALSLGLTPN
FKSNFDLAEDAKLQLSKDTYDDDLDNLLAQIGDQYADLFLAAKNLSDAILLSDI
LRVNTEITKAPLSASMIKRYDEHHQDLTLLKALVRQQLPEKYKEIFFDQSKNG
YAGYIDGGASQEEFYKFIKPILEKMDGTEELLVKLNREDLLRKQRTFDNGSIP
HQIHLGELHAILRRQEDFYPFLKDNREKIEKILTFRIPYYVGPLARGNSRFAWM
TRKSEETITPWNFEEVVDKGASAQSFIERMTNFDKNLPNEKVLPKHSLLYEYF
TVYNELTKVKYVTEGMRKPAFLSGEQKKAIVDLLFKTNRKVTVKQLKEDYF
KKIECFDSVEISGVEDRFNASLGTYHDLLKIIKDKDFLDNEENEDILEDIVLTLT
LFEDREMIEERLKTYAHLFDDKVMKQLKRRRYTGWGRLSRKLINGIRDKQSG
KTILDFLKSDGFANRNFMQLIHDDSLTFKEDIQKAQVSGQGDSLHEHIANLAG
SPAIKKGILQTVKVVDELVKVMGRHKPENIVIEMARENQTTQKGQKNSRERM
KRIEEGIKELGSQILKEHPVENTQLQNEKLYLYYLQNGRDMYVDQELDINRLS
DYDVDAIVPQSFLKDDSIDNKVLTRSDKNRGKSDNVPSEEVVKKMKNYWRQL
LNAKLITQRKFDNLTKAERGGLSELDKAGFIKRQLVETRQITKHVAQILDSRM
NTKYDENDKLIREVKVITLKSKLVSDFRKDFQFYKVREINNYHHAHDAYLNAV
VGTALIKKYPKLESEFVYGDYKVYDVRKMIAKSEQEIGKATAKYFFYSNIMNF
FKTEITLANGEIRKRPLIETNGETGEIVWDKGRDFATVRKVLSMPQVNIVKKT
EVQTGGFSKESILPKRNSDKLIARKKDWDPKKYGGFDSPTVAYSVLVVAKVEK
GKSKKLKSVKELLGITIMERSSFEKNPIDFLEAKGYKEVKKDLIIKLPKYSLFE
LENGRKRMLASAGELQKGNELALPSKYVNFLYLASHYEKLKGSPEDNEQKQL
FVEQHKHYLDEIIEQISEFSKRVILADANLDKVLSAYNKHRDKPIREQAENIIHL
FTLTNLGAPAAFKYFDTTIDRKRYTSTKEVLDATLIHQSITGLYETRIDLSQLGG
DSGGSSGGSCLSYETEILTVEYGLLPIGKIVEKRIECTVYSVDNNGNIYTQPVAQWH
DRGEQEVFEYCLEDGSLIRATKDHKFMTVDGQMLPIDEIFERELDLMRVDNLPNSG
GSKRTADGSEFEPKKKRKV
KEY:
NLS (SEQ ID NO: 124, 125)
CAS9 (SEQ ID NO: 445)
LINKER (SEQ ID NO: 446)
NPUN INTEIN (SEQ ID NO: 447)
S. PYOGENES PE, SPLIT AT LINKER, C TERMINAL PORTION
STRUCTURE: [C INTEIN]−[C EXTEIN]
(SEQ ID NO: 450)
MKRTADGSEFESPKKKRKVIKIATRKYLGKQNVYDIGVERDHNFALKNGFIASNCFNS
GSETPGTSESATPESSGGSSGGSSTLNIEDEYRLHETSKEPDVSLGSTWLSDFPQAWA
ETGGMGLAVRQAPLIIPLKATSTPVSIKQYPMSQEARLGIKPHIQRLLDQGILVPCQSPW
NTPLLPVKKPGTNDYRPVQDLREVNKRVEDIHPTVPNPYNLLSGLPPSHQWYTVLDLKD
AFFCLRLHPTSQPLFAFEWRDPEMGISGQLTWTRLPQGFKNSPTLFDEALHRDLADFRI
QHPDLILLQYVDDLLLAATSELDCQQGTRALLQTLGNLGYRASAKKAQICQKQVKYLGY
LLKEGQRWLTEARKETVMGQPTPKTPRQLREFLGTAGFCRLWIPGFAEMAAPLYPLTKT
GTLFNWGPDQQKAYQEIKQALLTAPALGLPDLTKPFELFVDEKQGYAKGVLTQKLGPW
RRPVAYLSKKLDPVAAGWPPCLRMVAAIAVLTKDAGKLTMGQPLVILAPHAVEALVKQP
PDRWLSNARMTHYQALLLDTDRVQFGPVVALNPATLLPLPEEGLQHNCLDILAEAHGTR
PDLTDQPLPDADHTWYTDGSSLLQEGQRKAGAAVTTETEVIWAKALPAGTSAQRAELIA
LTQALKMAEGKKLNVYTDSRYAFATAHIHGEIYRRRGLLTSEGKEIKNKDEILALLKALFLV
PKRLSIIHCPGHQKGHSAEARGNRMADQAARKAAITETPDTSTLLIENSSPSGGSKRTA
DGSEFEPKKKRKV
KEY:
NLS (SEQ ID NO: 124, 125)
LINKER 1 (SEQ ID NO: 453)
LINKER 2 (SEQ ID NO: 174)
NPUC INTEIN (SEQ ID NO: 452)
RT (SEQ ID NO: 454)
S. AUREUS PE, SPLIT BETWEEN RESIDUES 740/741, N TERMINAL PORTION
STRUCTURE: [N EXTEIN]−[N INTEIN]
(SEQ ID NO: 458)
MKRTADGSEFESPKKKRKVGKRNYILGLAIGITSVGYGIIDYETRDVIDAGVRLF
KEANVENNEGRRSKRGARRLKRRRRHRIQRVKKLLFDYNLLTDHSELSGINP
YEARVKGLSQKLSEEEFSAALLHLAKRRGVHNVNEVEEDTGNELSTKEQISRN
SKALEEKYVAELQLERLKKDGEVRGSINRFKTSDYVKEAKQLLKVQKAYHQL
DQSFIDTYIDLLETRRTYYEGPGEGSPFGWKDIKEWYEMLMGHCTYFPEELR
SVKYAYNADLYNALNDLNNLVITRDENEKLEYYEKFQIIENVFKQKKKPTLKQ
IAKEILVNEEDIKGYRVTSTGKPEFTNLKVYHDIKDITARKEIIENAELLDQIAKI
LTIYQSSEDIQEELTNLNSELTQEEIEQISNLKGYTGTHNLSLKAINLILDELWH
TNDNQIAIFNRLKLVPKKVDLSQQKEIPTTLVDDFILSPVVKRSFIQSIKVINAII
KKYGLPNDIIIELAREKNSKDAQKMINEMQKRNRQTNERIEEIIRTTGKENAK
YLIEKIKLHDMQEGKCLYSLEAIPLEDLLNNPFNYEVDHIIPRSVSFDNSFNNKV
LVKQEENSKKGNRTPFQYLSSSDSKISYETFKKHILNLAKGKGRISKTKKEYLL
EERDINRFSVQKDFINRNLVDTRYATRGLMNLLRSYFRVNNLDVKVKSINGGF
TSFLRRKWKFKKERNKGYKHHAEDALIIANADFIFKEWKKLDKAKKVMENQ
MFEEKQAECLSYETEILTVEYGLLPIGKIVEKRIECTVYSVDNNGNIYTQPVAQWH
DRGEQEVFEYCLEDGSLIRATKDHKFMTVDGQMLPIDEIFERELDLMRVDNLPNSG
GSKRTADGSEFEPKKKRKV
KEY:
NLS (SEQ ID NO: 124, 125)
CAS9 (SEQ ID NO: 460)
LINKER (SEQ ID NO: 174)
NPUN INTEIN (SEQ ID NO: 462)
S. AUREUS PE, SPLIT BETWEEN RESIDUES 740/741, C TERMINAL PORTION
STRUCTURE: [C INTEIN]−[C EXTEIN]
(SEQ ID NO: 465)
MKRTADGSEFESPKKKRKVIKIATRKYLGKQNVYDIGVERDHNFALKNGFIASNCFNE
IETEQEYKEIFITPHQIKHIKDFKDYKYSHRVDKKPNRKLINDTLYSTRKDDKG
NTLIVNNLNGLYDKDNDKLKKLINKSPEKLLMYHHDPQTYQKLKLIMEQYGD
EKNPLYKYYEETGNYLTKYSKKDNGPVIKKIKYYGNKLNAHLDITDDYPNSRN
KVVKLSLKPYRFDVYLDNGVYKFVTVKNLDVIKKENYYEVNSKCYEEAKKLK
KISNQAEFIASFYKNDLIKINGELYRVIGVNNDLLNRIEVNMIDITYREYLENMN
DKRPPHIIKTIASKTQSIKKYSTDILGNLYEVKSKKHPQIIKKGSGGSSGGSSGS
ETPGTSESATPESSGGSSGGSSTLNIEDEYRLHETSKEPDVSLGSTWLSDFPQAWAET
GGMGLAVRQAPLIIPLKATSTPVSIKQYPMSQEARLGIKPHIQRLLDQGILVPCQSPWNT
PLLPVKKPGTNDYRPVQDLREVNKRVEDIHPTVPNPYNLLSGLPPSHQWYTVLDLKDAF
FCLRLHPTSQPLFAFEWRDPEMGISGQLTWTRLPQGFKNSPTLFDEALHRDIADFRIQ
HPDLILLQYVDDLLIAATSELDCQQGTRALLQTLGNLGYRASAKKAQICQKQVKYLGYL
LKEGQRWLTEARKETVMGQPTPKTPRQLREFLGTAGFCRLWIPGFAEMAAPLYPLTKT
GTLFNWGPDQQKAYQEIKQALLTAPALGLPDLTKPFELFVDEKQGYAKGVLTQKLGPW
RRPVAYLSKKLDPVAAGWPPCLRMVAAIAVLTKDAGKLTMGQPLVILAPHAVEALVKQP
PDRWLSNARMTHYQALLLDTDRVQFGPVVALNPATLLPLPEEGLQHNCLDILAEAHGTR
PDLTDQPLPDADHTWYTDGSSLWEGORKAGAAVTTETEVIWAKALPAGTSAQRAELIA
LTQALKMAEGKKLNVYTDSRYAFATAHIHGEIYRRRGLLTSEGKEIKNKDEILALLKALFL
PKRLSIIHCPGHQKGHSAEARGNRMADQAARKAAITETPDTSTLLIENSSPSGGSKRTA
DGSEFEPKKKRKV
KEY:
NLS (SEQ ID NO: 124, 125)
CAS9 (SEQ ID NO: 467)
LINKER 1 (SEQ ID NO: 127)
LINKER 2 (SEQ ID NO: 174)
NPUC INTEIN (SEQ ID NO: 452)
RT (SEQ ID NO: 471)

[0848] In various embodiments, using SpCas9 nickase (SEQ ID NO: 18, 1368 amino acids) as an example, the split can between any two amino acids between 1 and 1368. Preferred splits, however, will be located between the central region of the protein, e.g., from amino acids 50-1250, or from 100-1200, or from 150-1150, or from 200-1100, or from 250-1050, or from 300-1000, or from 350-950, or from 400-900, or from 450-850, or from 500-800, or from 550-750, or from 600-700 of SEQ ID NO: 18. In specific exemplary embodiments, the split site may be between 740/741, or 801/802, or 1010/1011, or 1041/1042. In other embodiments the split site may be between 1/2, 2/3, 3/4, 4/5, 5/6, 6/7, 7/8, 8/9, 9/10, 10/11, 12/13, 14/15, 15/16, 17/18, 19/20, 20/21, 21/22, 22/23, 23/24, 24/25, 25/26, 26/27, 27/28, 28/29, 29/30, 30/31, 31/32, 32/33, 33/34, 34/35, 35/36, 36/37, 38/39, 39/40, 41/42, 42/43, 43/44, 44/45, 45/46, 46/47, 47/48, 48/49, 49/50, 51/52, 52/53, 53/54, 54/55, 55/56, 56/57, 57/58, 58/59, 59/60, 61/62, 62/63, 63/64, 64/65, 65/66, 66/67, 67/68, 68/69, 69/70, 71/72, 72/73, 73/74, 74/75, 75/76, 76/77, 77/78, 78/79, 79/80, 81/82, 82/83, 83/84, 84/85, 85/86, 86/87, 87/88, 88/89, 89/90, or between any two pairs of adjacent residues between 90-100, 100-150, 150-200, 200-250, 250-300, 300-350, 350-400, 450-500, 500-550, 550-600, 600-650, 650-700, 700-750, 750-800, 800-850, 850-900, 900-950, 950-1000, 1000-1050, 1050-1100, 1100-1150, 1150-1200, 1200-1250, 1250-1300, 1300-1350, and 1350-1368, relative to SpCas9 of SEQ ID NO: 18, at between any two corresponding residues in an amino acid sequence having at least 80%, 85%, 90%, 95%, 98%, 99%, or 99.9% sequence identity with SEQ ID NO: 18, or between any two corresponding residues in a variant or equivalent of SpCas9 of any of amino acid sequences SEQ ID NOs. 19-88, or an amino acid sequence having at least 80%, 85%, 90%, 95%, 98%, 99%, or 99.9% sequence identity with any of SEQ ID NOs: 19-88.

[0849] In various embodiments, the split intein sequences can be engineered by from the following intein sequences.

| NAME | SEQUENCE OF LIGAND-DEPENDENT INTEIN |
|---|---|
| 2-4 INTEIN: | CLAEGTRIFDPVTGTTHRIEDVVDGRKPIHVVAAAKDGTLLARPVV |
| | SWFDQGTRDVIGLRIAGGAIVWATPDHKVLTEYGWRAAGELRKGD |
| | RVAGPGGSGNSLALSLTADQMVSALLDAEPPILYSEYDPTSPFSEAS |
| | MMGLLTNLADRELVHMINWAKRVPGFVDLTLHDQAHLLECAWLEI |
| | LMIGLVWRSMEHPGKLLFAPNLLLDRNQGKCVEGMVEIFDMLLAT |
| | SSRFRMMNLQGEEFVCLKSIILLNSGVYTFLSSTLKSLEEKDHIHRA |
| | LDKITDTLIHLMAKAGLTLQQQHQRLAQLLLILSHIRHMSNKGMEH |
| | LYSMKYKNVVPLYDLLLEMLDAHRLHAGGSGASRVQAFADALDD |
| | KFLHDMLAEELRYSVIREVLPTRRARTFDLEVEELHTLVAEGVVVH |
| | NC (SEQ ID NO: 472) |
| 3-2 INTEIN | CLAEGTRIFDPVTGTTHRIEDVVDGRKPIHVVAVAKDGTLLARPVVS |
| | WFDQGTRDVIGLRIAGGAIVWATPDHKVLTEYGWRAAGELRKGDR |
| | VAGPGGSGNSLALSLTADQMVSALLDAEPPILYSEYDPTSPFSEASM |
| | MGLLTNLADRELVHMINWAKRVPGFVDLTLHDQAHLLECAWLEIL |
| | MIGLVWRSMEHPGKLLFAPNLLLDRNQGKCVEGMVEIFDMLLATS |
| | SRFRMMNLQGEEFVCLKSIILLNSGVYTFLSSTLKSLEEKDHIHRAL |
| | DKITDTLIHLMAKAGLTLQQQHQRLAQLLLILSHIRHMSNKGMEHL |
| | YSMKYTNVVPLYDLLLEMLDAHRLHAGGSGASRVQAFADALDDK |
| | FLHDMLAEELRYSVIREVLPTRRARTFDLEVEELHTLVAEGVVVHN |
| | C (SEQ ID NO: 473) |
| 30R3-1 INTEIN | CLAEGTRIFDPVTGTTHRIEDVVDGRKPIHVVAAAKDGTLLARPVV |
| | SWFDQGTRDVIGLRIAGGATVWATPDHKVLTEYGWRAAGELRKG |
| | DRVAGPGGSGNSLALSLTADQMVSALLDAEPPIPYSEYDPTSPFSEA |
| | SMMGLLTNLADRELVHMINWAKRVPGFVDLTLHDQAHLLECAWL |
| | EILMIGLVWRSMEHPGKLLFAPNLLLDRNQGKCVEGMVEIFDMLL |
| | ATSSRFRMMNLQGEEFVCLKSIILLNSGVYTFLSSTLKSLEEKDHIH |
| | RALDKITDTLIHLMAKAGLTLQQQHQRLAQLLLILSHIRHMSNKGM |
| | EHLYSMKYKNVVPLYDLLLEMLDAHRLHAGGSGASRVQAFADAL |
| | DDKFLHDMLAEGLRYSVIREVLPTRRARTFDLEVEELHTLVAEGVV |
| | VHNC (SEQ ID NO: 474) |
| 30R3-2 INTEIN | CLAEGTRIFDPVTGTTHRIEDVVDGRKPIHVVAAAKDGTLLARPVV |
| | SWFDQGTRDVIGLRIAGGATVWATPDHKVLTEYGWRAAGELRKG |
| | DRVAGPGGSGNSLALSLTADQMVSALLDAEPPILYSEYDPTSPFSEA |
| | SMMGLLTNLADRELVHMINWAKRVPGFVDLTLHDQAHLLECAWL |
| | EILMIGLVWRSMEHPGKLLFAPNLLLDRNQGKCVEGMVEIFDMLL |
| | ATSSRFRMMNLQGEEFVCLKSIILLNSGVYTFLSSTLKSLEEKDHIH |
| | RALDKITDTLIHLMAKAGLTLQQQHQRLAQLLLILSHIRHMSNKGM |
| | EHLYSMKYKNVVPLYDLLLEMLDAHRLHAGGSGASRVQAFADAL |
| | DDKFLHDMLAEELRYSVIREVLPTRRARTFDLEVEELHTLVAEGVV |
| | VHNC (SEQ ID NO: 475) |
| 30R3-3 INTEIN | CLAEGTRIFDPVTGTTHRIEDVVDGRKPIHVVAAAKDGTLLARPVV |
| | SWFDQGTRDVIGLRIAGGATVWATPDHKVLTEYGWRAAGELRKG |
| | DRVAGPGGSGNSLALSLTADQMVSALLDAEPPIPYSEYDPTSPFSEA |
| | SMMGLLTNLADRELVHMINWAKRVPGFVDLTLHDQAHLLECAWL |
| | EILMIGLVWRSMEHPGKLLFAPNLLLDRNQGKCVEGMVEIFDMLL |
| | ATSSRFRMMNLQGEEFVCLKSIILLNSGVYTFLSSTLKSLEEKDHIH |
| | RALDKITDTLIHLMAKAGLTLQQQHQRLAQLLLILSHIRHMSNKGM |
| | EHLYSMKYKNVVPLYDLLLEMLDAHRLHAGGSGASRVQAFADAL |
| | DDKFLHDMLAEELRYSVIREVLPTRRARTFDLEVEELHTLVAEGVV |
| | VHNC (SEQ ID NO: 476) |
| 37R3-1 INTEIN | CLAEGTRIFDPVTGTTHRIEDVVDGRKPIHVVAAAKDGTLLARPVV |
| | SWFDQGTRDVIGLRIAGGATVWATPDHKVLTEYGWRAAGELRKG |
| | DRVAGPGGSGNSLALSLTADQMVSALLDAEPPILYSEYNPTSPFSEA |
| | SMMGLLTNLADRELVHMINWAKRVPGFVDLTLHDQAHLLERAWL |
| | EILMIGLVWRSMEHPGKLLFAPNLLLDRNQGKCVEGMVEIFDMLL |
| | ATSSRFRMMNLQGEEFVCLKSIILLNSGVYTFLSSTLKSLEEKDHIH |
| | RALDKITDTLIHLMAKAGLTLQQQHQRLAQLLLILSHIRHMSNKGM |
| | EHLYSMKYKNVVPLYDLLLEMLDAHRLHAGGSGASRVQAFADAL |
| | DDKFLHDMLAEGLRYSVIREVLPTRRARTFDLEVEELHTLVAEGVV |
| | VHNC ((SEQ ID NO: 477) |
| 37R3-2 INTEIN | CLAEGTRIFDPVTGTTHRIEDVVDGRKPIHVVAAAKDGTLLARPVV |
| | SWFDQGTRDVIGLRIAGGAIVWATPDHKVLTEYGWRAAGELRKGD |
| | RVAGPGGSGNSLALSLTADQMVSALLDAEPPILYSEYDPTSPFSEAS |
| | MMGLLTNLADRELVHMINWAKRVPGFVDLTLHDQAHLLERAWLEI |
| | LMIGLVWRSMEHPGKLLFAPNLLLDRNQGKCVEGMVEIFDMLLAT |
| | SSRFRMMNLQGEEFVCLKSIILLNSGVYTFLSSTLKSLEEKDHIHRA |
| | LDKITDTLIHLMAKAGLTLQQQHQRLAQLLLILSHIRHMSNKGMEH |
| | LYSMKYKNVVPLYDLLLEMLDAHRLHAGGSGASRVQAFADALDD |
| | KFLHDMLAEGLRYSVIREVLPTRRARTFDLEVEELHTLVAEGVVVH |
| | NC (SEQ ID NO: 478) |
| 37R3-3 INTEIN | CLAEGTRIFDPVTGTTHRIEDVVDGRKPIHVVAVAKDGTLLARPVVS |
| | WFDQGTRDVIGLRIAGGATVWATPDHKVLTEYGWRAAGELRKGD |
| | RVAGPGGSGNSLALSLTADQMVSALLDAEPPILYSEYDPTSPFSEAS |
| | MMGLLTNLADRELVHMINWAKRVPGFVDLTLHDQAHLLERAWLEI |
| | LMIGLVWRSMEHPGKLLFAPNLLLDRNQGKCVEGMVEIFDMLLAT |
| | SSRFRMMNLQGEEFVCLKSIILLNSGVYTFLSSTLKSLEEKDHIHRA |
| | LDKITDTLIHLMAKAGLTLQQQHQRLAQLLLILSHIRHMSNKGMEH |
| | LYSMKYKNVVPLYDLLLEMLDAHRLHAGGSGASRVQAFADALDD |
| | KFLHDMLAEELRYSVIREVLPTRRARTFDLEVEELHTLVAEGVVVH |
| | NC (SEQ ID NO: 479) |

[0850] In various other embodiments, the split intein sequences can be used as follows:

| INTEIN-N | INTEIN-C |
|---|---|
| NPU-N | NPU-C |
| CLSYETEILTVEYGLLPIGKIVEKRIEC | IKIATRKYLGKQNVYDIG |
| TVYSVDNNGNIYTQPVAQWHDRGEQ | VERDHNFALKNGFIASN |
| EVFEYCLEDGSLIRATKDHKFMTVDG | (SEQ ID NO: 452) |
| QMLPIDEIFERELDLMRVDNLPNSGG | |
| S | |
| (SEQ ID NO: 447) | |

[0851] In various embodiments, the split inteins can be used to separately deliver separate portions of a complete PE fusion protein to a cell, which upon expression in a cell, become reconstituted as a complete PE fusion protein through the trans splicing.

[0852] In some embodiments, the disclosure provides a method of delivering a PE fusion protein to a cell, comprising:
[0853] (a) constructing a first expression vector encoding an N-terminal fragment of the PE fusion protein fused to a first split intein sequence;
[0854] (b) constructing a second expression vector encoding a C-terminal fragment of the PE fusion protein fused to a second split intein sequence;
[0855] (c) delivering the first and second expression vectors to a cell,
   wherein the N-terminal and C-terminal fragment are reconstituted as the PE fusion protein in the cell as a result of trans splicing activity causing self-excision of the first and second split intein sequences.

[0856] The split site in some embodiments can be anywhere in the prime editor fusion, including the napDNAbp domain, the linker, or the reverse transcriptase domain.

[0857] In other embodiments, the split site is in the napDNAbp domain.

[0858] In still other embodiments, the split site is in the reverse transcriptase or polymerase domain.

[0859] In yet other embodiments, the split site is in the linker.

[0860] In various embodiments, the present disclosure provides prime editors comprising a napDNAbp (e.g., a Cas9 domain) and a reverse transcriptase wherein one or both of the napDNAbp and/or the reverse transcriptase comprise an intein, for example, a ligand-dependent intein. Typically the intein is a ligand-dependent intein which exhibits no or minimal protein splicing activity in the absence of ligand (e.g., small molecules such as 4-hydroxytamoxifen, peptides, proteins, polynucleotides, amino acids, and nucleotides). Ligand-dependent inteins are known, and include those described in U.S. patent application U.S. Ser. No. 14/004,280, published as U.S. 2014/0065711 A1, the entire contents of which are incorporated herein by reference. In addition, use of split-Cas9 architecture In some embodiments, the intein comprises an amino acid sequence selected from the group consisting of SEQ ID NOs: 8-15, 447, 452, 462, and 472-479.

[0861] In various embodiments, the napDNAbp domains are smaller-sized napDNAbp domains as compared to the canonical SpCas9 domain of SEQ ID NO: 18.

[0862] The canonical SpCas9 protein is 1368 amino acids in length and has a predicted molecular weight of 158 kilodaltons. The term “small-sized Cas9 variant”, as used herein, refers to any Cas9 variant—naturally occurring, engineered, or otherwise—that is less than at least 1300 amino acids, or at least less than 1290 amino acids, or than less than 1280 amino acids, or less than 1270 amino acid, or less than 1260 amino acid, or less than 1250 amino acids, or less than 1240 amino acids, or less than 1230 amino acids, or less than 1220 amino acids, or less than 1210 amino acids, or less than 1200 amino acids, or less than 1190 amino acids, or less than 1180 amino acids, or less than 1170 amino acids, or less than 1160 amino acids, or less than 1150 amino acids, or less than 1140 amino acids, or less than 1130 amino acids, or less than 1120 amino acids, or less than 1110 amino acids, or less than 1100 amino acids, or less than 1050 amino acids, or less than 1000 amino acids, or less than 950 amino acids, or less than 900 amino acids, or less than 850 amino acids, or less than 800 amino acids, or less than 750 amino acids, or less than 700 amino acids, or less than 650 amino acids, or less than 600 amino acids, or less than 550 amino acids, or less than 500 amino acids, but at least larger than about 400 amino acids and retaining the required functions of the Cas9 protein.

[0863] In one embodiment, as depicted in Example 20, the specification embraces the following split-intein PE constructs, which are split between residues 1024 and 1025 of the canonical SpCas9 (SEQ ID NO: 18) (or which may be referred to as residues 1023 and 1024, respectively, relative to a Met-minus SEQ ID NO: 18).

[0864] First, the amino acid sequence of SEQ ID NO: 18 is shown as follows, indicating the location of the split site between 1024 (“K”) and 1025 (“S”) residues:

| Description | Sequence | SEQ ID NO: |
|---|---|---|
| SpCas9 | MDKKYSIGLDIGTNSVGWAVITDEYKVPSKKFKVLGN | SEQ ID NO: |
| Streptococcus | TDRHSIKKNLIGALLFDSGETAEATRLKRTARRRYTRR | 18, indicated |
| pyogenes | KNRICYLQEIFSNEMAKVDDSFFHRLEESFLVEEDKKH | with split site |
| M1 | ERHPIFGNIVDEVAYHEKYPTIYHLRKKLVDSTDKADL | 1024/1025 in |
| SwissProt | RLIYLALAHMIKFRGHFLIEGDLNPDNSDVDKLFIQLVQ | bold |
| Accession | TYNQLFEENPINASGVDAKAILSARLSKSRRLENLIAQL | The M at |
| No. | PGEKKNGLFGNLIALSLGLTPNFKSNFDLAEDAKLQLS | position 1 is |
| Q99ZW2 | KDTYDDDLDNLLAQIGDQYADLFLAAKNLSDAILLSDI | not necessarily |
| Wild type | LRVNTEITKAPLSASMIKRYDEHHQDLTLLKALVRQQL | present in the |
| | PEKYKEIFFDQSKNGYAGYIDGGASQEEFYKFIKPILEK | PE fusion |
| | MDGTEELLVKLNREDLLRKQRTFDNGSIPHQIHLGELH | protein in |
| | AILRRQEDFYPFLKDNREKIEKILTFRIPYYVGPLARGN | certain |
| | SRFAWMTRKSEETITPWNFEEVVDKGASAQSFIERMTN | embodiments. |
| | FDKNLPNEKVLPKHSLLYEYFTVYNELTKVKYVTEGM | Thus, the |
| | RKPAFLSGEQKKAIVDLLFKTNRKVTVKQLKEDYFKKI | numbering of |
| | ECFDSVEISGVEDRFNASLGTYHDLLKIIKDKDFLDNEE | the split site is |
| | NEDILEDIVLTLTLFEDREMIEERLKTYAHLFDDKVMK | 1023/1024 in |
| | QLKRRRYTGWGRLSRKLINGIRDKQSGKTILDFLKSDG | the case that |
| | FANRNFMQLIHDDSLTFKEDIQKAQVSGQGDSLHEHIA | the amino acid |
| | NLAGSPAIKKGILQTVKVVDELVKVMGRHKPENIVIEM | sequence |
| | ARENQTTQKGQKNSRERMKRIEEGIKELGSQILKEHPV | excludes Met |
| | ENTQLQNEKLYLYYLQNGRDMYVDQELDINRLSDYD | at position 1. |
| | VDHIVPQSFLKDDSIDNKVLTRSDKNRGKSDNVPSEEV | |
| | VKKMKNYWRQLLNAKLITQRKFDNLTKAERGGLSEL | |
| | DKAGFIKRQLVETRQITKHVAQILDSRMNTKYDENDK | |
| | LIREVKVITLKSKLVSDFRKDFQFYKVREINNYHHAHD | |
| | AYLNAVVGTALIKKYPKLESEFVYGDYKVYDVRKMIA | |
| | KSEQEIGKATAKYFFYSNIMNFFKTEITLANGEIRKRPLI | |
| | ETNGETGEIVWDKGRDFATVRKVLSMPQVNIVKKTEV | |
| | QTGGFSKESILPKRNSDKLIARKKDWDPKKYGGFDSPT | |
| | VAYSVLVVAKVEKGKSKKLKSVKELLGITIMERSSFEK | |
| | NPIDFLEAKGYKEVKKDLIIKLPKYSLFELENGRKRML | |
| | ASAGELQKGNELALPSKYVNFLYLASHYEKLKGSPED | |
| | NEQKQLFVEQHKHYLDEIIEQISEFSKRVILADANLDKV | |
| | LSAYNKHRDKPIREQAENIIHLFTLTNLGAPAAFKYFDT | |
| | TIDRKRYTSTKEVLDATLIHQSITGLYETRIDLSQLGGD | |

[0865] In this configuration, the amino acid sequence of N-terminal half (amino acids 1-1024 is as follows:

(SEQ ID NO: 3877)
MDKKYSIGLDIGTNSVGWAVITDEYKVPSKKFKVLGNTDRHSIKKNLIGAL
LFDSGETAEATRLKRTARRRYTRRKNRICYLQEIFSNEMAKVDDSFFHRLE
ESFLVEEDKKHERHPIFGNIVDEVAYHEKYPTIYHLRKKLVDSTDKADLRL
IYLALAHMIKFRGHFLIEGDLNPDNSDVDKLFIQLVQTYNQLFEENPINAS
GVDAKAILSARLSKSRRLENLIAQLPGEKKNGLFGNLIALSLGLTPNFKSN
FDLAEDAKLQLSKDTYDDDLDNLLAQIGDQYADLFLAAKNLSDAILLSDIL
RVNTEITKAPLSASMIKRYDEHHQDLTLLKALVRQQLPEKYKEIFFDQSKN
GYAGYIDGGASQEEFYKFIKPILEKMDGTEELLVKLNREDLLRKQRTFDNG
SIPHQIHLGELHAILRRQEDFYPFLKDNREKIEKILTFRIPYYVGPLARGN
SRFAWMTRKSEETITPWNFEEVVDKGASAQSFIERMTNFDKNLPNEKVLPK
HSLLYEYFTVYNELTKVKYVTEGMRKPAFLSGEQKKAIVDLLFKTNRKVTV
KQLKEDYFKKIECFDSVETSGVEDRFNASLGTYHDLLKIIKDKDFLDNEEN
EDILEDIVLTLTLFEDREMIEERLKTYAHLFDDKVMKQLKRRRYTGWGRLS
RKLINGIRDKQSGKTILDFLKSDGFANRNFMQLIHDDSLTFKEDIQKAQVS
GQGDSLHEHIANLAGSPAIKKGILQTVKVVDELVKVMGRHKPENIVIEMAR
ENQTTQKGQKNSRERMKRIEEGIKELGSQILKEHPVENTQLQNEKLYLYYL
QNGRDMYVDQELDINRLSDYDVDAIVPQSFLKDDSIDNKVLTRSDKNRGKS
DNVPSEEVVKKMKNYWRQLLNAKLITQRKFDNLTKAERGGLSELDKAGFIK
RQLVETRQITKHVAQILDSRMNTKYDENDKLIREVKVITLKSKLVSDFRKD
FQFYKVREINNYHHAHDAYLNAVVGTALIKKYPKLESEFVYGDYKVYDVRK
MIAK.

[0866] In this configuration, the amino acid sequence of N-terminal half (amino acids 1-1023) (where the protein is Met-minus at position 1) is as follows:

(SEQ ID NO: 3878)
DKKYSIGLDIGTNSVGWAVITDEYKVPSKKFKVLGNTDRHSIKKNLIGALL
FDSGETAEATRLKRTARRRYTRRKNRICYLQEIFSNEMAKVDDSFFHRLEE
SFLVEEDKKHERHPIFGNIVDEVAYHEKYPTIYHLRKKLVDSTDKADLRLI
YLALAHMIKFRGHFLIEGDLNPDNSDVDKLFIQLVQTYNQLFEENPINASG
VDAKAILSARLSKSRRLENLIAQLPGEKKNGLFGNLIALSLGLTPNFKSNF
DLAEDAKLQLSKDTYDDDLDNLLAQIGDQYADLFLAAKNLSDAILLSDILR
VNTEITKAPLSASMIKRYDEHHQDLTLLKALVRQQLPEKYKEIFFDQSKNG
YAGYIDGGASQEEFYKFIKPILEKMDGTEELLVKLNREDLLRKQRTFDNGS
IPHQIHLGELHAILRRQEDFYPFLKDNREKIEKILTFRIPYYVGPLARGNS
RFAWMTRKSEETITPWNFEEVVDKGASAQSFIERMTNFDKNLPNEKVLPKH
SLLYEYFTVYNELTKVKYVTEGMRKPAFLSGEQKKAIVDLLFKTNRKVTVK
QLKEDYFKKIECFDSVETSGVEDRFNASLGTYHDLLKIIKDKDFLDNEENE
DILEDIVLTLTLFEDREMIEERLKTYAHLFDDKVMKQLKRRRYTGWGRLSR
KLINGIRDKQSGKTILDFLKSDGFANRNFMQLIHDDSLTFKEDIQKAQVSG
QGDSLHEHIANLAGSPAIKKGILQTVKVVDELVKVMGRHKPENIVIEMARE
NQTTQKGQKNSRERMKRIEEGIKELGSQILKEHPVENTQLQNEKLYLYYLQ
NGRDMYVDQELDINRLSDYDVDAIVPQSFLKDDSIDNKVLTRSDKNRGKSD
NVPSEEVVKKMKNYWRQLLNAKLITQRKFDNLTKAERGGLSELDKAGFIKR
QLVETRQITKHVAQILDSRMNTKYDENDKLIREVKVITLKSKLVSDFRKDF
QFYKVREINNYHHAHDAYLNAVVGTALIKKYPKLESEFVYGDYKVYDVRKM
IAK.

[0867] In this configuration, the amino acid sequence of C-terminal half (amino acids 1024-1368 (or counted as amino acids 1023-1367 in a Met-minus Cas9) is as follows:

(SEQ ID NO: 3879)
SEQEIGKATAKYFFYSNIMNFFKTEITLANGEIRKRPLIETNGETGEIVWD
KGRDFATVRKVLSMPQVNIVKKTEVQTGGFSKESILPKRNSDKLIARKKDW
DPKKYGGFDSPTVAYSVLVVAKVEKGKSKKLKSVKELLGITIMERSSFEKN
PIDFLEAKGYKEVKKDLIIKLPKYSLFELENGRKRMLASAGELQKGNELAL
PSKYVNFLYLASHYEKLKGSPEDNEQKQLFVEQHKHYLDEIIEQISEFSKR
VILADANLDKVLSAYNKHRDKPIREQAENIIHLFTLTNLGAPAAFKYFDTT
IDRKRYTSTKEVLDATLIHQSITGLYETRIDLSQLGGD.

[0868] As shown in Example 20, the PE2 (which is based on SpCas9 of SEQ ID NO: 18) construct was split at position 1023/1024 (relative to a Met-minus SEQ ID NO: 18) into two separate constructs, as follows:

[0869] The present disclosure also contemplates methods of delivering split-intein prime editors to cells and/or treating cells with split-intein prime editors.

[0870] In some embodiments, the disclosure provides a method of delivering a PE fusion protein to a cell, comprising:
[0871] (a) constructing a first expression vector encoding an N-terminal fragment of the PE fusion protein fused to a first split intein sequence;
[0872] (b) constructing a second expression vector encoding a C-terminal fragment of the PE fusion protein fused to a second split intein sequence;
[0873] (c) delivering the first and second expression vectors to a cell,
   wherein the N-terminal and C-terminal fragment are reconstituted as the PE fusion protein in the cell as a result of trans splicing activity causing self-excision of the first and second split intein sequences.

[0874] In certain embodiments, the N-terminal fragment of the PE fusion protein fused to a first split intein sequence is SEQ ID NO: 3875, or an amino acid sequence having at least 80%, at least 85%, at least 90%, at least 95%, at least 98%, or at least 99.9% sequence identity with SEQ ID NO: 3875.

[0875] In other embodiments, the C-terminal fragment of the PE fusion protein fused to a first split intein sequence is SEQ ID NO: 3876, or an amino acid sequence having at least 80%, at least 85%, at least 90%, at least 95%, at least 98%, or at least 99.9% sequence identity with SEQ ID NO: 3876.

[0876] In other embodiments, the disclosure provides a method of editing a target DNA sequence within a cell, comprising:
[0877] (a) constructing a first expression vector encoding an N-terminal fragment of the PE fusion protein fused to a first split intein sequence;
[0878] (b) constructing a second expression vector encoding a C-terminal fragment of the PE fusion protein fused to a second split intein sequence;
[0879] (c) delivering the first and second expression vectors to a cell,
   wherein the N-terminal and C-terminal fragment are reconstituted as the PE fusion protein in the cell as a result of trans splicing activity causing self-excision of the first and second split intein sequences.

[0880] In certain embodiments, the N-terminal fragment of the PE fusion protein fused to a first split intein sequence is SEQ ID NO: 3875, or an amino acid sequence having at least 80%, at least 85%, at least 90%, at least 95%, at least 98%, or at least 99.9% sequence identity with SEQ ID NO: 3875.

[0881] In other embodiments, the C-terminal fragment of the PE fusion protein fused to a first split intein sequence is SEQ ID NO: 3876, or an amino acid sequence having at least 80%, at least 85%, at least 90%, at least 95%, at least 98%, or at least 99.9% sequence identity with SEQ ID NO: 3876.

### Delivery of PE Ribonucleoprotein Complexes

[0882] In this aspect, the prime editors may be delivered by non-viral delivery strategies involving delivery of a prime editor complexed with a PEgRNA (i.e., a PE ribonucleoprotein complex) by various methods, including electroporation and lipid nanoparticles. Methods of non-viral delivery of nucleic acids include lipofection, nucleofection, microinjection, biolistics, virosomes, liposomes, immunoliposomes, polycation or lipid:nucleic acid conjugates, naked DNA, artificial virions, and agent-enhanced uptake of DNA. Lipofection is described in e.g., U.S. Pat. Nos. 5,049,386, 4,946,787; and 4,897,355) and lipofection reagents are sold commercially (e.g., Transfectam™ and Lipofectin™). Cationic and neutral lipids that are suitable for efficient receptor-recognition lipofection of polynucleotides include those of Feigner, WO 91/17424; WO 91/16024. Delivery can be to cells (e.g. in vitro or ex vivo administration) or target tissues (e.g. in vivo administration).

[0883] The preparation of lipid:nucleic acid complexes, including targeted liposomes such as immunolipid complexes, is well known to one of skill in the art (see, e.g., Crystal, Science 270:404-410 (1995); Blaese et al., Cancer Gene Ther. 2:291-297 (1995); Behr et al., Bioconjugate Chem. 5:382-389 (1994); Remy et al., Bioconjugate Chem. 5:647-654 (1994); Gao et al., Gene Therapy 2:710-722 (1995); Ahmad et al., Cancer Res. 52:4817-4820 (1992); U.S. Pat. Nos. 4,186,183, 4,217,344, 4,235,871, 4,261,975, 4,485,054, 4,501,728, 4,774,085, 4,837,028, and 4,946,787).

[0884] Additional reference may be made to the following references that discuss approaches for non-viral delivery of ribonucleoprotein complexes, each of which are incorporated herein by reference.
[0885] Chen, Sean, et al. “Highly efficient mouse genome editing by CRISPR ribonucleoprotein electroporation of zygotes.” Journal of Biological Chemistry (2016): jbc-M116. PubMed
[0886] Zuris, John A., et al. “Cationic lipid-mediated delivery of proteins enables efficient protein-based genome editing in vitro and in vivo.” Nature biotechnology 33.1 (2015): 73. PubMed
[0887] Rouet, Romain, et al. “Receptor-Mediated Delivery of CRISPR-Cas9 Endonuclease for Cell-Type-Specific Gene Editing.” Journal of the American Chemical Society 140.21 (2018): 6596-6603. PubMed.

[0888] FIG. 68C provides data showing that various disclosed PE ribonucleoprotein complexes (PE2 at high concentration, PE3 at high concentration and PE3 at low concentration) can be delivered in this manner.

Delivery of PE by mRNA

[0889] Another method that may be employed to deliver prime editors and/or PEgRNAs to cells in which prime editing-based genome editing is desired is by employing the use of messenger RNA (mRNA) delivery methods and technologies. Examples of mRNA delivery methods and compositions that may be utilized in the present disclosure including, for example, PCT/US2014/028330, U.S. Pat. No. 8,822,663B2, NZ700688A, ES2740248T3, EP2755693A4, EP2755986A4, WO2014152940A1, EP3450553B1, BR112016030852A2, and EP3362461A1, each of which are incorporated herein by reference in their entireties. Additional disclosure hereby incorporated by reference can be found in Kowalski et al., “Delivering the Messenger: Advances in Technologies for Therapeutic mRNA Delivery,” Mol Therap., 2019; 27(4): 710-728.

[0890] In contrast to DNA vector encoding prime editors, the use of RNA as delivery agent for prime editors has the advantage that the genetic material does not have to enter the nucleus to perform its function. The delivered mRNA may be directly translated in the cytoplasm into the desired protein (e.g., prime editor fusion protein) and nucleic acid products (e.g., PEgRNA). However, in order to be more stable (e.g., resist RNA-degrading enzymes in the cytoplasm), it is in some embodiments necessary to stabilize the mRNA to improve delivery efficiency. Certain delivery carriers such as cationic lipids or polymeric delivery carriers can also help protect the transfected mRNA from endogenous RNase enzymes that might otherwise degrade the therapeutic mRNA encoding the desired prime editor fusion proteins. In addition, despite the increased stability of modified mRNA, delivery of mRNA, particularly mRNA encoding full-length protein, to cells in vivo in a manner that allows therapeutic levels of protein production remains a challenge.

[0891] With some exceptions, the intracellular delivery of mRNA is generally more challenging than that of small oligonucleotides, and it requires encapsulation into a delivery nanoparticle, in part due to the significantly larger size of mRNA molecules (300-5,000 kDa, ˜1-15 kb) as compared to other types of RNAs (small interfering RNAs [siRNAs], ˜14 kDa; antisense oligonucleotides [ASOs], 4-10 kDa).

[0892] mRNA must cross the cell membrane in order to reach the cytoplasm. The cell membrane is a dynamic and formidable barrier to intracellular delivery. It is made up primarily of a lipid bilayer of zwitterionic and negatively charged phospholipids, where the polar heads of the phospholipids point toward the aqueous environment and the hydrophobic tails form a hydrophobic core.

[0893] In some embodiments, the mRNA compositions of the disclosure comprise mRNA (encoding a prime editor and/or PEgRNA), a transport vehicle, and optionally an agent that facilitates contact with the target cell and subsequent transfection.

[0894] In some embodiments, the mRNA can include one or more modifications that confer stability to the mRNA (eg, compared to the wild-type or native version of the mRNA) and is involved in the associated abnormal expression of the protein. One or more modifications to the wild type that correct the defect may also be included. For example, the nucleic acids of the invention can include modifications of one or both of a 5′ untranslated region or a 3′ untranslated region. Such modifications may include the inclusion of sequences encoding a partial sequence of the cytomegalovirus (CMV) immediate early 1 (IE1) gene, poly A tail, Cap1 structure, or human growth hormone (hGH). In some embodiments, the mRNA is modified to reduce mRNA immunogenicity.

[0895] In one embodiment, the “prime editor” mRNA in the composition of the invention can be formulated in a liposome transfer vehicle to facilitate delivery to target cells. Contemplated transfer vehicles can include one or more cationic lipids, non-cationic lipids, and/or PEG-modified lipids. For example, the transfer vehicle can include at least one of the following cationic lipids: C12-200, DLin-KC2-DMA, DODAP, HGT4003, ICE, HGT5000, or HGT5001. In embodiments, the transfer vehicle comprises cholesterol (chol) and/or PEG modified lipids. In some embodiments, the transfer vehicle comprises DMG-PEG2K. In certain embodiments, the transfer vehicle has the following lipid formulation: C12-200, DOPE, chol, DMG-PEG2K; DODAP, DOPE, cholesterol, DMG-PEG2K; HGT5000, DOPE, chol, DMG-PEG2K, HGT5001, DOPE, chol, one of DMG-PEG2K.

[0896] The present disclosure also provides compositions and methods useful for facilitating transfection of target cells with one or more PE-encoding mRNA molecules. For example, the compositions and methods of the present invention contemplate the use of targeting ligands that can increase the affinity of the composition for one or more target cells. In one embodiment, the targeting ligand is apolipoprotein B or apolipoprotein E, and the corresponding target cells express low density lipoprotein receptors and thus promote recognition of the targeting ligand. A vast number of target cells can be preferentially targeted using the methods and compositions of the present disclosure. For example, contemplated target cells include hepatocytes, epithelial cells, hematopoietic cells, epithelial cells, endothelial cells, lung cells, bone cells, stem cells, mesenchymal cells, nerve cells, heart cells, adipocytes, vascular smooth muscle Includes cells, cardiomyocytes, skeletal muscle cells, beta cells, pituitary cells, synovial lining cells, ovarian cells, testis cells, fibroblasts, B cells, T cells, reticulocytes, leukocytes, granulocytes, and tumor cells. However, it is not limited to these.

[0897] In some embodiments, the PE-encoding mRNA may optionally have chemical or biological modifications which, for example, improve the stability and/or half-life of such mRNA or which improve or otherwise facilitate protein production. Upon transfection, a natural mRNA in the compositions of the invention may decay with a half-life of between 30 minutes and several days. The mRNAs in the compositions of the disclosure may retain at least some ability to be translated, thereby producing a functional protein or enzyme. Accordingly, the invention provides compositions comprising and methods of administering a stabilized mRNA. In some embodiments, the activity of the mRNA is prolonged over an extended period of time. For example, the activity of the mRNA may be prolonged such that the compositions of the present disclosure are administered to a subject on a semi-weekly or bi-weekly basis, or more preferably on a monthly, bi-monthly, quarterly or an annual basis. The extended or prolonged activity of the mRNA of the present invention is directly related to the quantity of protein or enzyme produced from such mRNA. Similarly, the activity of the compositions of the present disclosure may be further extended or prolonged by modifications made to improve or enhance translation of the mRNA. Furthermore, the quantity of functional protein or enzyme produced by the target cell is a function of the quantity of mRNA delivered to the target cells and the stability of such mRNA. To the extent that the stability of the mRNA of the present invention may be improved or enhanced, the half-life, the activity of the produced protein or enzyme and the dosing frequency of the composition may be further extended.

[0898] Accordingly, in some embodiments, the mRNA in the compositions of the disclosure comprise at least one modification which confers increased or enhanced stability to the nucleic acid, including, for example, improved resistance to nuclease digestion in vivo. As used herein, the terms “modification” and “modified” as such terms relate to the nucleic acids provided herein, include at least one alteration which preferably enhances stability and renders the mRNA more stable (e.g., resistant to nuclease digestion) than the wild-type or naturally occurring version of the mRNA. As used herein, the terms “stable” and “stability” as such terms relate to the nucleic acids of the present invention, and particularly with respect to the mRNA, refer to increased or enhanced resistance to degradation by, for example nucleases (i.e., endonucleases or exonucleases) which are normally capable of degrading such mRNA. Increased stability can include, for example, less sensitivity to hydrolysis or other destruction by endogenous enzymes (e.g., endonucleases or exonucleases) or conditions within the target cell or tissue, thereby increasing or enhancing the residence of such mRNA in the target cell, tissue, subject and/or cytoplasm. The stabilized mRNA molecules provided herein demonstrate longer half-lives relative to their naturally occurring, unmodified counterparts (e.g. the wild-type version of the mRNA). Also contemplated by the terms “modification” and “modified” as such terms related to the mRNA of the present invention are alterations which improve or enhance translation of mRNA nucleic acids, including for example, the inclusion of sequences which function in the initiation of protein translation (e.g., the Kozak consensus sequence). (Kozak, M., Nucleic Acids Res 15 (20): 8125-48 (1987)).

[0899] In some embodiments, the mRNAs used in the compositions of the disclosure have undergone a chemical or biological modification to render them more stable. Exemplary modifications to an mRNA include the depletion of a base (e.g., by deletion or by the substitution of one nucleotide for another) or modification of a base, for example, the chemical modification of a base. The phrase “chemical modifications” as used herein, includes modifications which introduce chemistries which differ from those seen in naturally occurring mRNA, for example, covalent modifications such as the introduction of modified nucleotides, (e.g., nucleotide analogs, or the inclusion of pendant groups which are not naturally found in such mRNA molecules).

[0900] Other suitable polynucleotide modifications that may be incorporated into the PE-encoding mRNA used in the compositions of the disclosure include, but are not limited to, 4′-thio-modified bases: 4′-thio-adenosine, 4′-thio-guanosine, 4′-thio-cytidine, 4′-thio-uridine, 4′-thio-5-methyl-cytidine, 4′-thio-pseudouridine, and 4′-thio-2-thiouridine, pyridin-4-one ribonucleoside, 5-aza-uridine, 2-thio-5-aza-uridine, 2-thiouridine, 4-thio-pseudouridine, 2-thio-pseudouridine, 5-hydroxyuridine, 3-methyluridine, 5-carboxymethyl-uridine, 1-carboxymethyl-pseudouridine, 5-propynyl-uridine, 1-propynyl-pseudouridine, 5-taurinomethyluridine, 1-taurinomethyl-pseudouridine, 5-taurinomethyl-2-thio-uridine, 1-taurinomethyl-4-thio-uridine, 5-methyl-uridine, 1-methyl-pseudouridine, 4-thio-1-methyl-pseudouridine, 2-thio-1-methyl-pseudouridine, 1-methyl-1-deaza-pseudouridine, 2-thio-1-methyl-1-deaza-pseudouridine, dihydrouridine, dihydropseudouridine, 2-thio-dihydrouridine, 2-thio-dihydropseudouridine, 2-methoxyuridine, 2-methoxy-4-thio-uridine, 4-methoxy-pseudouridine, 4-methoxy-2-thio-pseudouridine, 5-aza-cytidine, pseudoisocytidine, 3-methyl-cytidine, N4-acetylcytidine, 5-formylcytidine, N4-methylcytidine, 5-hydroxymethylcytidine, 1-methyl-pseudoisocytidine, pyrrolo-cytidine, pyrrolo-pseudoisocytidine, 2-thio-cytidine, 2-thio-5-methyl-cytidine, 4-thio-pseudoisocytidine, 4-thio-1-methyl-pseudoisocytidine, 4-thio-1-methyl-1-deaza-pseudoisocytidine, 1-methyl-1-deaza-pseudoisocytidine, zebularine, 5-aza-zebularine, 5-methyl-zebularine, 5-aza-2-thio-zebularine, 2-thio-zebularine, 2-methoxy-cytidine, 2-methoxy-5-methyl-cytidine, 4-methoxy-pseudoisocytidine, 4-methoxy-1-methyl-pseudoisocytidine, 2-aminopurine, 2,6-diaminopurine, 7-deaza-adenine, 7-deaza-8-aza-adenine, 7-deaza-2-aminopurine, 7-deaza-8-aza-2-aminopurine, 7-deaza-2,6-diaminopurine, 7-deaza-8-aza-2,6-diaminopurine, 1-methyladenosine, N6-methyladenosine, N6-isopentenyladenosine, N6-(cis-hydroxyisopentenyl)adenosine, 2-methylthio-N6-(cis-hydroxyisopentenyl)adenosine, N6-glycinylcarbamoyladenosine, N6-threonylcarbamoyladenosine, 2-methylthio-N6-threonyl carbamoyladenosine, N6,N6-dimethyladenosine, 7-methyladenine, 2-methylthio-adenine, and 2-methoxy-adenine, inosine, 1-methyl-inosine, wyosine, wybutosine, 7-deaza-guanosine, 7-deaza-8-aza-guanosine, 6-thio-guanosine, 6-thio-7-deaza-guanosine, 6-thio-7-deaza-8-aza-guanosine, 7-methyl-guanosine, 6-thio-7-methyl-guanosine, 7-methylinosine, 6-methoxy-guanosine, 1-methylguanosine, N2-methylguanosine, N2,N2-dimethylguanosine, 8-oxo-guanosine, 7-methyl-8-oxo-guanosine, 1-methyl-6-thio-guanosine, N2-methyl-6-thio-guanosine, and N2,N2-dimethyl-6-thio-guanosine, and combinations thereof. The term modification also includes, for example, the incorporation of non-nucleotide linkages or modified nucleotides into the mRNA sequences of the present invention (e.g., modifications to one or both of the 3′ and 5′ ends of an mRNA molecule encoding a functional protein or enzyme). Such modifications include the addition of bases to an mRNA sequence (e.g., the inclusion of a poly A tail or a longer poly A tail), the alteration of the 3′ UTR or the 5′ UTR, complexing the mRNA with an agent (e.g., a protein or a complementary nucleic acid molecule), and inclusion of elements which change the structure of an mRNA molecule (e.g., which form secondary structures).

[0901] In some embodiments, PE-encoding mRNAs include a 5′ cap structure. A 5′ cap is typically added as follows: first, an RNA terminal phosphatase removes one of the terminal phosphate groups from the 5′ nucleotide, leaving two terminal phosphates; guanosine triphosphate (GTP) is then added to the terminal phosphates via a guanylyl transferase, producing a 5′5′5 triphosphate linkage; and the 7-nitrogen of guanine is then methylated by a methyltransferase. Examples of cap structures include, but are not limited to, m7G(5′)ppp (5′(A,G(5′)ppp(5′)A and G(5′)ppp(5′)G. Naturally occurring cap structures comprise a 7-methyl guanosine that is linked via a triphosphate bridge to the 5′-end of the first transcribed nucleotide, resulting in a dinucleotide cap of m7G(5′)ppp(5′)N, where N is any nucleoside. In vivo, the cap is added enzymatically. The cap is added in the nucleus and is catalyzed by the enzyme guanylyl transferase. The addition of the cap to the 5′ terminal end of RNA occurs immediately after initiation of transcription. The terminal nucleoside is typically a guanosine, and is in the reverse orientation to all the other nucleotides, i.e., G(5′)ppp(5′)GpNpNp.

[0902] Additional cap analogs include, but are not limited to, a chemical structures selected from the group consisting of m7GpppG, m7GpppA, m7GpppC; unmethylated cap analogs (e.g., GpppG); dimethylated cap analog (e.g., m2,7GpppG), trimethylated cap analog (e.g., m2,2,7GpppG), dimethylated symmetrical cap analogs (e.g., m7Gpppm7G), or anti reverse cap analogs (e.g., ARCA; m7,2′OmeGpppG, m72′dGpppG, m7,3′OmeGpppG, m7,3′dGpppG and their tetraphosphate derivatives) (see, e.g., Jemielity, J. et al., “Novel ‘anti-reverse’ cap analogs with superior translational properties”, RNA, 9: 1108-1122 (2003)).

[0903] Typically, the presence of a “tail” serves to protect the mRNA from exonuclease degradation. A poly A or poly U tail is thought to stabilize natural messengers and synthetic sense RNA. Therefore, in certain embodiments a long poly A or poly U tail can be added to an mRNA molecule thus rendering the RNA more stable. Poly A or poly U tails can be added using a variety of art-recognized techniques. For example, long poly A tails can be added to synthetic or in vitro transcribed RNA using poly A polymerase (Yokoe, et al. Nature Biotechnology. 1996; 14: 1252-1256). A transcription vector can also encode long poly A tails. In addition, poly A tails can be added by transcription directly from PCR products. Poly A may also be ligated to the 3′ end of a sense RNA with RNA ligase (see, e.g., Molecular Cloning A Laboratory Manual, 2nd Ed., ed. by Sambrook, Fritsch and Maniatis (Cold Spring Harbor Laboratory Press: 1991 edition)).

[0904] Typically, the length of a poly A or poly U tail can be at least about 10, 50, 100, 200, 300, 400 at least 500 nucleotides. In some embodiments, a poly-A tail on the 3′ terminus of mRNA typically includes about 10 to 300 adenosine nucleotides (e.g., about 10 to 200 adenosine nucleotides, about 10 to 150 adenosine nucleotides, about 10 to 100 adenosine nucleotides, about 20 to 70 adenosine nucleotides, or about 20 to 60 adenosine nucleotides). In some embodiments, mRNAs include a 3′ poly(C) tail structure. A suitable poly-C tail on the 3′ terminus of mRNA typically include about 10 to 200 cytosine nucleotides (e.g., about 10 to 150 cytosine nucleotides, about 10 to 100 cytosine nucleotides, about 20 to 70 cytosine nucleotides, about 20 to 60 cytosine nucleotides, or about 10 to 40 cytosine nucleotides). The poly-C tail may be added to the poly-A or poly U tail or may substitute the poly-A or poly U tail.

[0905] PE-encoding mRNAs according to the present disclosure may be synthesized according to any of a variety of known methods. For example, mRNAs according to the present invention may be synthesized via in vitro transcription (IVT). Briefly, IVT is typically performed with a linear or circular DNA template containing a promoter, a pool of ribonucleotide triphosphates, a buffer system that may include DTT and magnesium ions, and an appropriate RNA polymerase (e.g., T3, T7 or SP6 RNA polymerase), DNAse I, pyrophosphatase, and/or RNAse inhibitor. The exact conditions will vary according to the specific application.

[0906] In embodiments involving mRNA delivery, the ratio of the mRNA encoding the PE fusion protein to the PEgRNA may be important for efficient editing. In certain embodiments, the weight ratio of mRNA (encoding the PE fusion protein) to PEgRNA is 1:1. In certain other embodiments, the weight ratio of mRNA (encoding the PE fusion protein) to PEgRNA is 2:1. In still other embodiments, the weight ratio of mRNA (encoding the PE fusion protein) to PEgRNA is 1:2. In still further embodiments, the weight ratio of mRNA (encoding the PE fusion protein) to PEgRNA is selected from the group consisting of about 1:1000, 1:900; 1:800; 1:700; 1:600; 1:500; 1:400; 1:300; 1:200; 1:100; 1:90; 1:80; 1:70; 1:60; 1:50; 1:40; 1:30; 1:20; 1:10; and 1:1. In other embodiments, the weight ratio of mRNA (encoding the PE fusion protein) to PEgRNA is selected from the group consisting of about 1:1000, 1:900; 800:1; 700:1; 600:1; 500:1; 400:1; 300:1; 200:1; 100:1; 90:1; 80:1; 70:1; 60:1; 50:1; 40:1; 30:1; 20:1; 10:1; and 1:1.

[0907] J. Use of Prime Editing for Identifying Off-Target Editing in an Unbiased Manner

[0908] Like other genome editors, there exists some risk that PE may introduce its programmed genetic alterations at unintended sites around the genome, i.e., “off-target” sites. However, there are currently no described methods to detect off-target editing with prime editors. Such methods would allow the identification of potential sites of off-target editing using prime editors.

[0909] The key concept of this aspect is the idea of using prime editing to insert the same adapter sequence and/or primer binding site at on-target and off-target sites, templated from the same PEgRNA, to enable the rapid identification of genomic off-target modification sites of napDNAbp nucleases or prime editors. This method is distinguished from other techniques that identify nuclease off-target sites because the adapter and/or primer binding sequence is inserted in the same event as DNA binding and nicking by the napDNAbp, simplifying the downstream processing.

[0910] FIG. 33 illustrates the basic principle of off-target identification. The figure is a schematic showing PEgRNA design for primer binding sequence insertions and primer binding insertion into genomic DNA using prime editing for determining off-target editing. In this embodiment, prime editing is conducted inside a living cell, a tissue, or an animal model. As a first step, an appropriate PEgRNA is designed. The top schematic shows a exemplary PEgRNA that may be used in this aspect. The spacer in the PEgRNA (labeled as “protospacer”) is complementary to one of the strands of the genomic target. The PE:PEgRNA complex (i.e., the PE complex) installs a single stranded 3′ end flap at the nick site which contains the encoded primer binding sequence and the region of homology (coded by the homology arm of the PEgRNA) that is complementary to the region just downstream of the cut site (in red). Through flap invasion and DNA repair/replication processes, the synthesized strand becomes incorporated into the DNA, thereby installing the primer binding site. This process can occur at the desired genomic target, but also at other genomic sites that might interact with the PEgRNA in an off-target manner (i.e., the PEgRNA guides the PE complex to other off-target sites due to the complementarity of the spacer region to other genomic sites that are not the intended genomic site). Thus, the primer binding sequence may be installed not only at the desired genomic target, but at off-target genomic sites elsewhere in the genome. In order to detect the insertion of these primer binding sites at both the intended genomic target sites and the off-target genomic sites, the genomic DNA (post-PE) can be isolated, fragmented, and ligated to adapter nucleotides (shown in red). Next, PCR may be carried out with PCR oligonucleotides that anneal to the adapters and to the inserted primer binding sequence to amplify on-target and off-target genomic DNA regions into which the primer binding site was inserted by PE. High throughput sequencing then may be conducted, as well as sequence alignments, to identify the insertion points of PE-inserted primer binding sequences at either the on-target site or at off-target sites.

[0911] Thus, FIG. 33 illustrates one aspect regarding the identification of off-target editing sites when editing inside a living cell, in tissue culture or animal models. To conduct this method, a PEgRNA is generated that has an identical spacer to the final desired prime editor (and, if looking at prime editing off-targets, an identical primer-binding site sequence to the final desired editor), but includes the necessary sequences to install an adapter or primer binding site after reverse transcription by prime editing. In vivo editing is conducted using a prime editor or RT-fused nuclease, and isolate genomic DNA. The genomic DNA is fragmented by enzymatic or mechanical means and append a different adapter to sites of DNA fragmentation. PCR is used to amplify from one adapter to the adapter installed via PEgRNA. The resulting product is deep-sequenced to identify all modified sites.

[0912] In another aspect, evaluation of off-target editing by PE may be conducted in vitro. In this aspect, PE may be used during in vitro modification of genomic DNA identification of off-target editing sites using in vitro modification of genomic DNA. To conduct this method, ribonucleoprotein (RNP) of purified prime editor fusion protein and a PEgRNA (i.e., the PE complex) is assembled that is configured to install an adapter or primer binding sequence at a target site, but is otherwise the same as the PEgRNA of interest. This RNP (i.e., PE complex) is incubated with extracted genomic DNA before or after fragmentation of the DNA. After fragmentation, different adapters sequences are ligated to the ends of the fragment DNA. PCR is used to amplify those genomic sites that span the inserted adapter sequence (i.e., inserted by EP) and the adapters ligated to fragment ends. High throughput sequencing between the adapters sequences can identify genomic sites of modification that are on-target and off-target. This in vitro editing method should enhance the sensitivity of detection because cellular DNA repair will not eliminate the reverse-transcribed DNA adapter added by the prime editor.

[0913] These methods could be used to identify off-target editing for any prime editor, or any genome editor that uses a guide RNA to recognize a target cut site (most Cas nucleases).

[0914] These methods could be applied to all genetic diseases for which genome editors are considered for use in treatment.

[0915] Exemplary adapter and/or primer binding sequences that may be installed by PE include, but are not limited to:

| | |
|---|---|
| ADAPTER 1 | 5′-CGGTGGACCGATGATCT-3′ (SEQ ID NO: 177) |
| ADAPTER 2 | 5′-GCCACCTGGCTACTAGA-3′ (SEQ ID NO: 178) |
| ADAPTER 3 | 5′-AGATCATCGGTCCACCG-3′ (SEQ ID NO: 179) |
| ADAPTER 4 | 5′-TCTAGTAGCCAGGTGGC-3′ (SEQ ID NO: 180) |

[0916] These adapter and/or primer binding sequences may also be used in the ligation step after genomic DNA fragmentation as outlined above.

[0917] Exemplary PEgRNA designs that illustrate the use of the herein described method to evaluate off-target editing, and their edit target locus, are as follows:

| | |
|---|---|
| HEK3 TEST LOCUS OFF- | GGCCCAGACTGAGCACGTGAGTTTTAGAGCTAGAAATA |
| TARGET DISCOVERY: | GCAAGTTAAAATAAGGCTAGTCCGTTATCAACTTGAA |
| | AAAGTGGCACCGAGTCGGTGCTCTGCCATCACGGTG |
| | GACCGATGATCTCGTGCTCAGTCTG (SEQ ID NO: 181) |
| HEK4 TEST LOCUS OFF- | GGCACTGCGGCTGGAGGTGGGTTTTAGAGCTAGAAAT |
| TARGET DISCOVERY: | AGCAAGTTAAAATAAGGCTAGTCCGTTATCAACTTGA |
| | AAAAGTGGCACCGAGTCGGTGCACACAGCACCAGAG |
| | TCTCCGCTTTAACCCCCAGCCACCTGGCTACTAGACC |
| | TCCAGCC (SEQ ID NO: 182) |
| SICKLE CELL | GCATGGTGCACCTGACTCCTGGTTTTAGAGCTAGAAA |
| CORRECTION OFF- | TAGCAAGTTAAAATAAGGCTAGTCCGTTATCAACTTG |
| TARGET DISCOVERY: | AAAAAGTGGCACCGAGTCGGTGCAGACTTCTCTTCA |
| | GGCCACCTGGCTACTAGAGAGTCAGGTGCAC (SEQ ID |
| | NO: 183) |

KEY
PBS Spacer
sgRNA scaffold
DNA synthesis template
Adapter
PBS

[0918] K. Use of Prime Editing for Insertion of Inducible Dimerization Domains

[0919] The prime editors described herein may also be used to install dimerization domains into one or more protein targets. The dimerization domains may facilitate inducible regulation of the activity associated with the dimerization of the one or more protein targets via a linking moiety (e.g., a small molecule, peptide, or protein) that binds in a bi-specific manner. In various aspects, the dimerization domains, when installed on different proteins (e.g., the same type or different proteins), each bind to the same bi-specific moiety (e.g., a bi-specific small molecule, peptide, or polypeptide having a least two regions that separately bind to the dimerization domains), thereby causing the dimerization of the proteins through their common interaction to the bi-specific ligand. In this manner, the bi-specific ligand functions as an “inducer” of dimerization of two proteins. In some cases, the bi-specific ligand or compound will have two targeting moieties that are the same. In other embodiments, the bi-specific ligand or compound will have targeting moieties that are each different from the other. The bi-specific ligand or compound having the same two targeting moieties will be able to target the same dimerization domain installed on different protein targets. The bi-specific ligand or compound having different targeting moieties will be able to target different dimerization domains installed on different protein targets.

[0920] As used herein, the term “dimerization domain” refers to a ligand-binding domain that binds to a binding moiety of a bi-specific ligand. A “first” dimerization domain binds to a first binding moiety of a bi-specific ligand and a “second” dimerization domain binds to a second binding moiety of the same bi-specific ligand. When the first dimerization domain is fused to a first protein (e.g., via PE, as discussed herein) and the second dimerization domain (e.g., via PE, as discussed herein) is fused to a second protein, the first and second protein dimerize in the presence of a bi-specific ligand, wherein the bi-specific ligand has at least one moeity that binds to the first dimerization domain and at least another moiety that binds to the second dimerization domain.

[0921] The term “bi-specific ligand” or “bi-specific moiety,” as used herein, refers to a ligand that binds to two different ligand-binding domains. In various embodiments, the bi-specific moiety itself is a dimer of two of same or two different chemical moieties, wherein each moiety specifically and tightly binds to a dimerization domain. In certain embodiments, the ligand is a small molecule compound, or a peptide, or a polypeptide. In other embodiments, ligand-binding domain is a “dimerization domain,” which can be install as a peptide tag onto a protein. In various embodiments, two proteins each comprising the same or different dimerization domains can be induced to dimerize through the binding of each dimerization domain to the bi-specific ligand. These molecules may also be referred to as “chemical inducers of dimerization” or CIDs. In addition, the bi-specific ligands may be prepared by coupling (e.g., through standardize chemical linkages) two of the same moieties together, or two different moieties together, wherein each moiety tightly and specifically binds to a dimerization domain.

[0922] In various aspects, the dimerization domains installed by PE can be the same or different.

[0923] For example, the dimerization domains can be FKBP12, which has the following amino acid sequence:

| FKBP12 | MGVQVETISPGDGRTFPKRGQTCVVHYTG |
|---|---|
| | MLEDGKKFDSSRDRNKPFKFMLGKQEVIR |
| | GWEEGVAQMSVGQRAKLTISPDYAYGATG |
| | HPGIIPPHATLVFDVELLKLE (SEQ ID NO: |
| | 488) |

[0924] In another example, the dimerization domain can be a mutant of FKBP12 referred to as FKBP12-F36V, a mutant of FKBP12 with an engineered hole that binds a synthetic bumped FK506 mimic (2, FIG. 3)¹⁰⁷:

| FKBP12-F36V | MGVQVETISPGDGRTFPKRGQTCVVHYTG |
|---|---|
| | MLEDGKKVDSSRDRNKPFKFMLGKQEVI |
| | RGWEEGVAQMSVGQRAKLTISPDYAYGAT |
| | GHPGIIPPHATLVFDVELLKLE (SEQ ID NO: |
| | 489) |

[0925] In another example, the dimerization domain can be cyclophilin, as follows:

| CYCLOPHILIN | MVNPTVFFDIAVDGEPLGRVSFELFADKVP |
|---|---|
| | KTAENFRALSTGEKGFGYKGSCFHRIIPGF |
| | MCQGGDFTRHNGTGGKSIYGEKFEDENFI |
| | LKHTGPGILSMANAGPNTNGSQFFICTAKT |
| | EWLDGKHVVFGKVKEGMNIVEAMERFGS |
| | RNGKTSKKITIADCGQLE (SEQ ID NO: |
| | 490) |

[0926] In various embodiments, the amino acid sequences of these dimerization domains may be altered in order to optimize binding or to improve binding orthogonality to native targets. The nucleic acid sequences of the genes encoding small-molecule binding proteins may be altered in order to optimize the efficiency of the PE process, such as by reducing PEgRNA secondary structure.

[0927] Other examples of suitable dimerization domains and a cognate small molecule compound which binds thereto are provided as follows. Note that the cognate small molecule compound could be coupled (e.g., via a chemical linker) to a second small molecule compound (either the same compound or a different compound) in order to form a bi-specific ligand that may bind two dimerization domains. In some cases, such as FK506 and cyclosporin A, dimerization of each (e.g., FK506-FK506 or cyclosporin A-cyclosporin A) reduces or eliminates immunosuppressive activity of the monomeric compounds.

| SMALL MOLECULE—BINDS TO THE DIMERIZATION | |
|---|---|
| DOMAIN—A DIMER OF THESE MOLECULES WOULD CONSTITUTE A | |
| BI-SPECIFIC LIGAND THAT WOULD BIND TWO DIMERIZATION DOMAINS | DIMERIZATION DOMAIN(S) |
| FK506 [chemical structure] FK-506 FKBP12 Kd 0.4 nM PNAS 1990, 87, 9231. TARGETS: FKBP12 + CALCINEURIN | AMINO ACID SEQUENCE OF FKBP12: MGVQVETISPGDGRTFPKRGQTCV VHYTGMLEDGKKFDSSRDRNKPFK FMLGKQEVIRGWEEGVAQMSVGQ RAKLTISPDYAYGATGHPGIIPPHAT LVFDVELLKLE (SEQ ID NO: 491) CALCINEURIN: |
| CYCLOSPORIN A [chemical structure] TARGETS: CYCLOPHILIN + CALCINEURIN | AMINO ACID SEQUENCE OF HUMAN CYCLOPHILIN A: MVNPTVFFDIAVDGEPLGRVSFELF ADKVPKTAENFRALSTGEKGFGYK GSCFHRIIPGFMCQGGDFTRHNGTG GKSIYGEKFEDENFILKHTGPGILSM ANAGPNTNGSQFFICTAKTEWLDG KHVVFGKVKEGMNIVEAMERFGS RNGKTSKKITIADCGQLE (SEQ ID NO: 490) AMINO ACID SEQUENCE OF HUMAN CYCLOPHILIN B: MLRLSERNMKVLLAAALIAGSVFF LLLPGPSAADEKKKGPKVTVKVYF DLRIGDEDVGRVIFGLFGKTVPKTV DNFVALATGEKGFGYKNSKFHRVIK DFMIQGGDFTRGDGTGGKSIYGER FPDENFKLKHYGPGWVSMANAGK DTNGSQFFITTVKTAWLDGKHVVF GKVLEGMEVVRKVESTKTDSRDKP LKDVIIADCGKIEVEKPFAIAKE (SEQ ID NO: 493) AMINO ACID SEQUENCE OF MURINE CYCLOPHILIN C: MSPGPRLLLPAVLCLGLGALVSSSG SSGVRKRGPSVTDKVFFDVRIGDK DVGRIVIGLFGNVVPKTVENFVALA TGEKGYGYKGSIFHRVIKDFMIQGG DFTARDGTGGMSIYGETFPDENFKL KHYGIGWVSMANAGPDTNGSQFFI TLTKPTWLDGKHVVFGKVLDGMT |
| | VVHSIELQATDGHDRPLTDCTIVNS |
| | GKIDVKTPFVVEVPDW (SEQ ID |
| | NO: 494) |
| AP1867 [chemical structure] AP1867 FK-506 mimic FKBP12 F36V Kd 94 pM FKBP12 Kd 67 nM PNAS 1998, 95, 10437. TARGET(S): FKBP12 | AMINO ACID SEQUENCE OF FKBP12-F36V MGVQVETISPGDGRTFPKRGQTCV VHYTGMLEDGKKVDSSRDRNKPF KFMLGKQEVIRGWEEGVAQMSVG QRAKLT ISPDYAYGATGHPGIIPPHATLVFDV ELLKLE (SEQ ID NO: 495) |
| METHOTREXATE [chemical structure] methotrexate Human DHFR Kd < 10 nM J. Biol. Chem. 1988, 263, 10304. E. coli DHFR Kd 9.5 nM PNAS 2002, 99, 13481. TARGET(S): DIHYDROFOLATE REDUCTASE | AMINO ACID SEQUENCE OF HUMAN DIHYDROFOLATE REDUCTASE MVGSLNCIVAVSQNMGIGKNGDLP WPPLRNEFRYFQRMTTTSSVEGKQ NLVIMGKKTWFSIPEKNRPLKGRIN LVLSRELKEPPQGAHFLSRSLDDAL KLTEQPELANKVDMVWIVGGSSVY KEAMNHPGHLKLFVTRIMQDFESD TFFPEIDLEKYKLLPEYPGVLSDVQ EEKGIKYKFEVYEKND (SEQ ID NO: 496) |
| TRIMETHOPRIM [chemical structure] trimethoprim E. coli DHFR K_{I} 1.3 nM Biochemistry 1982, 21, 5068. TARGET(S): DIHYDROFOLATE REDUCTASE | AMINO ACID SEQUENCE FOR E. COLI DIHYDROFOLATE REDUCTASE MISLIAALAVDRVIGMENAMPWNL PADLAWFKRNTLNKPVIMGRHTWE SIGRPLPGRKNIILSSQPGTDDRVTW VKS VDEAIAACGDVPEIMVIGGGRV YEQFLPKAQKLYLTHIDAEVEGDTH FPDYEPDDWESVFSEFHDADAQNS HSYCFEILERR (SEQ ID NO: 497) |
| DEXAMETHOSONE [chemical structure] dexamethasone Human GR Kd 4.6 nM Mol. Endocrin. 1999, 13, 1855. | AMINO ACID SEQUENCE FOR HUMAN GLUCOCORTICOID RECEPTOR MDSKESLTPGREENPSSVLAQERGD VMDFYKTLRGGATVKVSASSPSLA VASQSDSKQRRLLVDFPKGSVSNA QQPDLSKAVSLSMGLYMGETETKV MGNDLGFPQQGQISLSSGETDLKLL EESIANLNRSTSVPENPKSSASTAVS AAPTEKEF PKTHSDVSSEQQHLKGQTGTNGGN VKLYTTDQSTFDILQDLEFSSGSPG KETNESPWRSDLLIDENCLLSPLAG EDDSFLLEGNSNEDCKPLILPDTKP KIKDNGDLVLSSPSNVTLPQVKTEK EDFIELCTPGVIKQEKLGTVYCQAS FPGANIIGNKMSAISVHGVSTSGGQ MYHYDMNTASLSQQQDQKPIFNVI PPIPVGSENWNRCQGSGDDNLTSLG |
| | TLNFPGRTVFSNGYSSPSMRPDVSS |
| | PPSSSSTATTGPPPKLCLVCSDEASG |
| | CHYGVLTCGSCKVFFKRAVEGQHN |
| | YLCAGRNDCIIDKIRRKNCPACRYR |
| | KCLQAGMNLEARKTKKKIKGIQQA |
| | TTGVSQETSENPGNKTIVPATLPQLT |
| | PTLVSLLEVIEPEVLYAGYDSSVPDS |
| | TWRIMTTLNMLGGRQVIAAVKWA |
| | KAIPGFRNLHLDDQMTLLQYSWMF |
| | LMAFALGWRSYRQSSANLLCFAPD |
| | LIINEQRMTLPCMYDQCKHMLYVS |
| | SELHRLQVSYEEYLCMKTLLLLSSV |
| | PKDGLKSQELFDEIRMTYIKELGKA |
| | IVKREGNSSQNWQRFYQLTKLLDS |
| | MHEVVENLLNYCFQTFLDKTMSIE |
| | FPEMLAEIITNQIPKYSNGNIKKLLF |
| | HQK (SEQ ID NO: 498) |
| [chemical structure] RAPAMYCIN | AMINO ACID SEQUENCE OF FKBP12: MGVQVETISPGDGRTFPKRGQTCV VHYTGMLEDGKKFDSSRDRNKPFK FMLGKQEVIRGWEEGVAQMSVGQ RAKLTISPDYAYGATGHPGIIPPHAT LVFDVELLKLE (SEQ ID NO: 491) |

[0928] Other examples of naturally occurring bifunctional molecules and their dual target receptors are as follows. Prime editing may be used to install the dual target receptors into different proteins. Once the different proteins are modified by PE to contain a bifunctional molecule receptor, the bifunctional molecules may be introduced, thereby causing the dimerization of the proteins modified to comprise the different dimerization domains. Examples of pairings of (1) a biofunctional molecule and (2) their dual target receptors are as follows:

| | TARGET |
|---|---|
| | RECEPTORS |
| | OF THE |
| | BIOFUNCTIONAL |
| NATURALLY OCCURRING BIOFUNCTIONAL MOLECULES | MOLECULE |
| [chemical structure] auxin | Target receptor 1: auxin receptor Target receptor 2: TIR1 E3 ligase |
| [chemical structure] methyl jasmonate | Target receptor 1: JAZ receptor Target receptor 2: Col1 E3 ligase |
| brefeldin A [chemical structure] | target receptor 1: GBF1 target receptor 2: GTPase Arf1p |
| abscisic acid [chemical structure] | target receptor 1: PYR receptor target receptor 2: phosphoprotein phosphatase 2C |
| Forskolin [chemical structure] | target receptor 1: adenylyl cyclase monomers target receptor 2: adenylyl cyclase monomers |
| fusicoccin A [chemical structure] | target receptor 1: 14-3-3 proteins target receptor 2: H⁺-ATPase |
| Rapamycin [chemical structure] | target receptor 1: FKBP12 target receptor 2: mTOR |
| sanglifehrin A [chemical structure] Sanglifehrin A (SFA) | target receptor 1: cyclophilin target receptor 2: IMP dehydrogenase 2 |
| cyclosporin A [chemical structure] | target receptor 1: cyclophilin target receptor 2: calcineurin |

[chemical structure]

[0929] Examples of other bifunctional molecules that can be used with this aspect of prime editing are as follows:

[chemical structure]

[0930] Synstab A, paclitaxel, and discodermolide are microtubule stabilizers. Thus, these compounds could be used to dimerize proteins modified by PE to comprise microtubule proteins. GNE-0011, ARV-825, and dBET1 comprise a BRD4 binding motif and a CRBN binding motif. Thus, these compounds could be used to dimerize proteins modified by PE to comprise these targeting domains.

[0931] The PEgRNAs for installing dimerization domains may comprising the following structures (in reference to FIG. 3D):
[0932] 5′-[spacer]-[gRNA core]-[extension arm]-3′, wherein the extension arm comprises 5′-[homology arm]-[edit template]-[primer binding site]-3′; or
[0933] 5′-[extension arm]-[spacer]-[gRNA core]-3′, wherein the extension arm comprises 5′-[homology arm]-[edit template]-[primer binding site]-3′, and wherein with either configuration the “edit template” comprises a nucleotide sequence of a dimerization domain.

[0934] In one example, the PEgRNA for insertion of the FKBP12 dimerization domain at the C-terminal end of human insulin receptor (spacer underlined, gRNA core plain, flap homology bold, FKBP12 insertion in italics, annealing region bold italics):

| | |
|---|---|
| PEGRNA FOR | CACGGUAGGCACUGUUAGGAGUUUUAG |
| INSTALLING | AGCUAGAAAUAGCAAGUUAAAAUAAG |
| FKBP12 IN | GCUAGUCCGUUAUCAACUUGAAAAAGU |
| HUMAN | GGCACCGAGUCGGUGCUUGCCUCGGU |
| INSULIN | CCAAUCCUUCCGGAGUGCAGGUGGAAA |
| RECEPTOR | CCAUCUCCCCAGGAGACGGGCGCACCUU |
| | CCCCAAGCGCGGCCAGACCUGCGUGGUG |
| | CACUACACCGGGAUGCUUGAAGAUGGAA |
| | AGAAAUUUGAUUCCUCCCGGGACAGAAA |
| | CAAGCCCUUUAAGUUUAUGCUAGGCAAG |
| | CAGGAGGUGAUCCGAGGCUGGGAAGAAG |
| | GGGUUGCCCAGAUGAGUGUGGGUCAGA |
| | GAGCCAAACUGACUAUAUCUCCAGAUUA |
| | UGCCUAUGGUGCCACUGGGCACCCAGGC |
| | AUCAUCCCACCACAUGCCACUCUCGUCU |
| | UCGAUGUGGAGCUUCUAAAACUGGAA [symbol] |
| | [symbol] |
| | (SEQ ID NO: 499) |

[0935] In another example, the PEgRNA for insertion of the FKBP12 dimerization domain at the HEK3 locus (for optimization):

| PEGRNA FOR | GGCCCAGACTGAGCACGTGAGTTTTAGA |
|---|---|
| INSTALLING | GCTAGAAATAGCAAGTTAAAATAAGGC |
| FKBP12 IN HEK3 | TAGTCCGTTATCAACTTGAAAAAGTGGC |
| | ACCGAGTCGGTGCTGGAGGAAGCAGGG |
| | CTTCCTTTCCTCTGCCATCATTCCAGTTT |
| | TAGAAGCTCCACATCGAAGACGAGAGT |
| | GGCATGTGGTGGGATGATGCCTGGGTGC |
| | CCAGTGGCACCATAGGCATAATCTGGAG |
| | ATATAGTCAGTTTGGCTCTCTGACCCAC |
| | ACTCATCTGGGCAACCCCTTCTTCCCAG |
| | CCTCGGATCACCTCCTGCTTGCCTAGCA |
| | TAAACTTAAAGGGCTTGTTTCTGTCCCG |
| | GGAGGAATCAAATTTCTTTCCATCTTCA |
| | AGCATCCCGGTGTAGTGCACCACGCAGG |
| | TCTGGCCGCGCTTGGGGAAGGTGCGCCC |
| | GTCTCCTGGGGAGATGGTTTCCACCTGC |
| | ACTCCCGTGCTCAGTCTG (SEQ ID NO: |
| | 500) |

[0936] The target proteins for installing dimerization domains are not particularly limited; however, it is advantageous their dimerization (once modified by PE) in the presence of a bi-specific ligand produces some advantageous biological effect, e.g., a signaling pathway, decreased immunoresponsiveness, etc. In various aspects, the target proteins that are to be dimerized through the PE-dependent installation of dimerization domains can be the same protein or different proteins. Preferably, the proteins, when dimerized, trigger one or more downstream biological cascades, e.g., a signal transduction cascade, phorsphorylation, etc. Exemplary target proteins into which PE may be used to install dimerization domains, include, but are not limited to:

| MEMBRANDE- | KINASE | | | |
|---|---|---|---|---|
| BOUND | DOMAIN | CID | SIGNALING | |
| RECEPTOR | FUSED TO | EMPLOYED | CASCADE | REFERENCE |
| T-CELL | FKBP12 | FK1012 | T-CELL | SCIENCE 262, 1019-24 |
| RECEPTOR | | (FK506 | RECEPTOR | (1993) |
| | | DIMER) | SIGNALING | CHEM. BIOL. 1, 163-172 |
| | | | | (1994). |
| FAS RECEPTOR | MURINE | CYCLOSPORIN | FAS | CHEM. BIOL. 3, 731-738 |
| | CYCLOPHILIN | A | PATHWAY | (1996). |
| | C | DIMER | FOR | |
| | | | APOPTOSIS | |
| INSULIN | FKBP12 | FK1012 | INSULIN | CURR. BIOL. 8, 11-18 |
| RECEPTOR | | (FK506 | SIGNALING | (1998). |
| | | DIMER) | | |
| PLATELET- | FKBP12 | FK1012 | PDGF | CURR. BIOL. 8, 11-18 |
| DERIVED | | (FK506 | MESODERM | (1998). |
| GROWTH | | DIMER) | FORMATION | |
| FACTOR (PDGF) | | | SIGNALING | |
| BETA | | | | |
| ERYTHROPOIE | FKBP12 | FK1012 | EPOR- | PROC. NATL. ACAD. SCI. |
| TIN RECEPTOR | | (FK506 | MEDIATED | 94, 3076-3081 (2002). |
| (EPOR) | | DIMER) | PROLIFERATIVE | |
| | | | SIGNALING | |

[0937] In one aspect; prime editors described herein may be used to install sequences encoding dimerization domains into one or more genes encoding target proteins of interest in a living cell or patient. This may be referred to as the “prime editing—CID system,” wherein the CID is the bi-specific ligand that induced dimerization of target proteins, each fused to a dimerization domain installed by PE. This edit alone should have no physiological effect. Upon administration of a bi-specific ligand, which typically is a dimeric small molecule that can simultaneously bind to two dimerization domain each of which is fused to a copy of the target protein, the bi-specific ligand causes dimerization of the targeted protein. This target protein dimerization event then induces a biological signaling event, such as erythropoiesis or insulin signaling. A new method to place dimerization-induced biological processes, such as receptor signaling, under control of a convenient small-molecule drug (i.e., the bi-specific ligand) by the genomic integration of genes encoding small-molecule binding proteins (i.e., the dimerization domains) with prime editing is described herein.

[0938] Protein dimerization is a ubiquitous biological process. Notably, homodimerization of many membrane-bound receptors is known to initiate signaling cascades, often with profound biological consequences. A number of small-molecule natural products approved for use as drugs act as chemical inducers of protein dimerization as part of their mechanism of action.⁹² For example, FK506 binds tightly to FKBP12, and the resulting small molecule-protein complex then binds the phosphatase calcineurin, thereby inhibiting a step in T cell receptor signaling.⁹³. Likewise, cyclosporin A induces dimerization of cyclophilin and calcineurin, and rapamycin induces dimerization of FKBP and mTOR.^{93,94}

[0939] In one embodiment, leveraging the selective, high-affinity binding of the FK506:FKBP12 and cyclosporin A:cyclophilin small molecule:protein binding interaction, synthetic chemical inducers of dimerization have also been developed. In an example, a small molecule comprised of two units of FK506, termed FK1012, was shown to effect signal transduction when the cytoplasmic domains of signaling receptors were tagged with FKBP12.⁹⁵ Chemical inducers of dimerization (CIDs) have since been used to control a number of signaling pathways.⁹⁶⁻¹⁰³

[0940] While useful tools for studying biological processes, one challenge facing synthetic CIDs for therapeutic applications is that introduction of the FKBP12—or cyclophilin—target protein chimeras into patients is challenging.

[0941] The present disclosure brings together two concepts to create a previously inaccessible therapeutic process. The first concept is prime editing, described herein, which allows for precise genome editing, including targeted insertions, in living cells. The second concept is chemical-induced dimerization, a powerful tool that has enabled small-molecule control over signaling and oligomerization processes in cell culture.

[0942] Specific cases in which chemical control over protein dimerization may have had a beneficial therapeutic effect have been identified.

[0943] The insulin receptor is a heterotetrameric transmembrane protein that responds to insulin binding to the extracellular domain by phosphorylation of the cytoplasmic kinase domain.¹⁰⁴ An engineered chimeric protein composed of a membrane-localization component, the C-terminal kinase domain of the insulin receptor, and three copies of FKBP12 responds to FK1012 and initiates the insulin response in cell culture.⁹⁹ Similarly, it is expected that the fusion of FKBP12 to the C-terminal end of the kinase domain of the native insulin receptor in patient cells should allow for FK1012-dependent phosphorylation and initiation of the insulin signaling cascade. This system could replace or complement insulin use in patients who cannot make insulin (e.g., type-1 diabetics), or who respond weakly to insulin (e.g., type-2 diabetics).

[0944] Additionally, erythropoietin stimulates erythrocyte proliferation by binding to the erythropoietin receptor (EpoR), either inducing dimerization or a conformational change in a preformed receptor dimer which results in activation of the Jak/STAT signaling cascade.¹⁰⁵ It has been demonstrated that FK1012-induced oligomerization of the membrane-anchored cytoplasmic domain of EpoR tagged with FKBP12 is sufficient to initiate the signaling Jak/STAT signaling cascade and promote cell proliferation.¹⁰⁶ It is anticipated that fusing FKBP12 to native EpoR by prime editing in patient cells will allow for FK1012-induced control over erythrocyte proliferation (erythropoiesis). This system could be used to trigger red blood cell growth in anemic patients. FK1012-inducible EpoR could also be employed as an in vivo selectable marker for blood cells that have undergone ex vivo engineering.

[0945] In principle, any receptor tyrosine kinase could be viable target for a prime editing-CID therapeutic. The table below includes a list of all receptor tyrosine kinases in the human genome.¹¹⁰

| | | | | PROT | |
|---|---|---|---|---|---|
| Family | Receptor | Synonyms | NT Accession | Accession | Chromosome |
| ALK | ALK | Ki1 | NM_004304 | NP_004295 | 2p23 |
| family | LTK | TYK1 | NM_002344 | NP_002335 | 15q15.1-q21.1 |
| AXL | AXL | UFO, Tyro7(r) Ark(m) | NM_001699 | NP_001690 | 19q13.1 |
| family | MER | MERTK, NYK, Eyk(ch) | NM_006343 | NP_006334 | 2q14.1 |
| | TYRO3 | RSE, SKY, BRT, DTK, | NM_006293 | NP_006284 | 15q15.1-q21.1 |
| | | TIF | | | |
| DDR | DDR1 | CAK, TRKE, NEP | NM_013993 | NP_001945 | 6p21.3 |
| family | | NTRK4, EDDR1, PTK3 | | | |
| | DDR2 | TKT, TYR010, NTRKR3 | NM_006182 | NP_006173 | 1q21-q22 |
| EGFR | EGFR | ERBB, ERBB1 | NM_005228 | NP_005219 | 7p12 |
| family | ERBB2 | HER2, Neu(r), NGL | NM_004448 | NP_004439 | 17q11.2-q12 |
| | ERBB3 | HER3 | NM_001982 | NP_001973 | 12q13 |
| | ERBB4 | HER4 | NM_005235 | NP_005226 | 2q33.3-q34 |
| EPH family | EPHA1 | EPH, EPHT | NM_005232 | NP_005223 | 7q32-q36 |
| | EPHA2 | ECK, Sek(m), Myk2(m) | NM_004431 | NP_004422 | 1p34 |
| | EPHA3 | HEK, ETK1, Tyro4(r), | NM_005233 | NP_005224 | 3p11.2 |
| | | Mek4(m), Cek4(ch) | | | |
| | EPHA4 | HEK8, Tyro1(r), Sek1(m), | NM_004438 | NP_004429 | 2q36qter |
| | | Cek8(ch) | | | |
| | EPHA5 | HEK7, Ehk(r), Bsk(r), | L36644 | P54756 | |
| | | Cek7(ch) | | | |
| | EPHA6 | DKFZp434C1418, Ehk2(r) | AL133666 | | |
| | EPHA7 | HEK11, Mdk1(m), | NM_004440 | NP_004431 | 6q21 |
| | | Ebk(m), Ehk3(r), | | | |
| | | Cek11(ch) | | | |
| | EPHA8 | HEK3, KIAA1459, Eek(r), | AB040892 | CAB81612 | 1q23-q24 |
| | | Cek10(ch) | | | |
| | EPHB1 | NET, EPHT2, HEK6, | NM_004441 | NP_004432 | 3q21-q23 |
| | | Elk(r), Cek6(ch) | | | |
| | EPHB2 | HEK5, ERK, DRT, | AF025304 | AAB94602 | 1p36.1-p35 |
| | | EPHT3, Tyro5(r), Nuk(m), | | | |
| | | Sek3(m), Cek5(ch) | | | |
| | EPHB3 | HEK2, Tyro6, Mdk5(m), | NM_004443 | NP_004434 | 3q21-qter |
| | | Sek4(m) | | | |
| | EPHB4 | HTK, Tyro11(r), | NM_004444 | NP_004435 | |
| | | Mdk2(m), Myk1 (m) | | | |
| | EPHB6 | HEP, Mep(m), Cek1(ch) | NM_004445 | NP_004436 | 7q33-q35 |
| FGFR | FGFR1 | FLT2, bFGFR, FLG, N- | M34641 | AAA35835 | 8p11.2 |
| family | | SAM | | | |
| | FGFR2 | KGFR, K-SAM, Bek(m), | NM_000141 | NP_000132 | 10q26 |
| | | CFD1, JWS, Cek3(ch) | | | |
| | FGFR3 | HBGFR, ACH, Cek2(ch) | NM_000142 | NP_000133 | 4p16.3 |
| | FGFR4 | | NM_002011 | NP_002002 | 5q35.1-qter |
| INSR | IGF1R | JTK13 | NM_000875 | NP_000866 | 15q25-q26 |
| family | INSR | IR | NM_000208 | NP_000199 | 19p13.3-p13.2 |
| | INSRR | IRR | J05046 | AAC31759 | 1q21-q23 |
| MET | MET | HGFR | NM_000245 | NP_000236 | 7q31 |
| Family | RON | MST1R, CDw136, | NM_002447 | NP_002438 | 3p21.3 |
| | | Fv2(m), STK(m), SEA(ch) | | | |
| MUSK | MUSK | Nsk2(m), Mlk1(m), | NM_005592 | NP_005583 | 9q31.3-q32 |
| family | | Mk2(m) | | | |
| PDGFR | CSF1R | FMS, C-FMS, CD115 | NM_005211 | NP_005202 | 5q31-q32 |
| family | FLT3 | FLK2, STK1, CD135 | NM_004119 | NP_0041110 | 13q12 |
| | KIT | Sfr(m), CKIT | NM_000222 | NP_000213 | 4q11-q12 |
| | PDGFRA | | NM_006206 | NP_006197 | 4q11-q13 |
| | PDGFRB | PDGFR, JTK12 | NM_002609 | NP_002600 | 5q31-q32 |
| PTK7 | PTK7 | CCK4, KLG(ch) | NM_002821 | NP_002812 | 6p21.2-p12.2 |
| family | | | | | |
| RET family | RET | MEN2A/B, HSCR1, | X12949 | P07949 | 10q11.2 |
| | | MTC1 | | | |
| ROR | ROR1 | NTRKR1 | NM_005012 | NP_005003 | 1p32-p31 |
| family | ROR2 | NTRKR2 | NM_004560 | NP_004551 | |
| ROS family | ROS1 | MCF3 | NM_002944 | NP_002935 | 6q22 |
| RYK | RYK | Vlk(m), Mrk(m) | S59184 | AAB263411 | 3q22 |
| family | | | | | |
| TIE family | TEK | TIE2 | NM_000459 | NP_000450 | 9p21 |
| | TIE | TIE1, JTK14 | NM_005424 | NP_005415 | 1p34-p33 |
| TRK family | NTRK1 | TRK, TRKA | NM_002529 | NP_002520 | 1q21-q22 |
| | NTRK2 | TRKB | NM_006180 | NP_006171 | 9q22.1 |
| | NTRK3 | TRKC | NM_002530 | NP_002521 | 15q25 |
| VEGFR | VEGFR1 | FLT1 | NM_002019 | NP_002010 | 13q12 |
| family | VEGFR2 | KDR, FLK1 | | AAB88005 | 4q11-q12 |
| | VEGFR3 | FLT4, PCL | NM_002020 | NP_002011 | 5q34-q35 |
| AATYK | AATYK | AATK, KIAA0641 | NM_004920 | NP_004911 | 17q25.3 |
| family | AATYK2 | KIAA1079 | NM_014916 | NP_055731 | 7q21-q22 |
| | AATYK3 | | | | 19q13.2-q13.3 |

[0946] There are numerous advantages to the prime editing-CID system. One such advantage is that it can replace endogenous ligands, which are typically proteins that pose complications in manufacturing, cost, delivery, production, or storage, with drug-like small-molecules that can be orally administered instead of administered by IV or injection, are readily prepared from FDA-approved drugs (or are themselves already drugs), and do not incur special production or storage costs typically associated with protein drugs. Another advantage is that the edit alone should have no physiological effect. The amount of target protein dimerization can be controlled by dosing the small-molecule CID. Further, target protein dimerization is readily and rapidly reversible by adding the monomeric form of the CID. Yet another advantage is that in instances where a single ligand targets multiple receptors, selectivity can be achieved by prime-editing only one receptor. Finally, depending on the delivery method used for prime editing, it may also be possible to restrict editing to a localized tissue or organ, allowing for inducible receptor activation only in specific areas.

[0947] If editing efficiencies are high enough with prime editing that two separate editing events could occur at high levels, it would also be possible to tag two proteins of interest with different small-molecule binding domains (such as FKBP and cyclophilin) and induce heterodimerizations with small molecule heterodimers (such as an FK506-cyclosporin A dimer).

[0948] The fusion of FKBP12 or other small-molecule binding proteins to native proteins has been accomplished, generally by overexpression from plasmid in tissue culture. Subsequent chemical-induced dimerization has been demonstrated to induce phenotypic changes to cells producing the fusion proteins.

[0949] The following references are cited above in the Section G and are incorporated herein by reference.
[0950] 1. Crabtree, G. R. & Schreiber, S. L. Three-part inventions: intracellular signaling and induced proximity. Trends Biochem. Sci. 21, 418-22 (1996).
[0951] 2. Liu, J. et al. Calcineurin Is a Common Target of A and FKBP-FK506 Complexes. Cell 66, 807-815 (1991).
[0952] 3. Keith, C. T. et al. A mammalian protein targeted by G1-arresting rapamycin-receptor complex. Nature 369, 756-758 (2003).
[0953] 4. Spencer, D. M., Wandless, T. J., Schreiber, S. L. S. & Crabtree, G. R. Controlling signal transduction with synthetic ligands. Science 262, 1019-24 (1993).
[0954] 5. Pruschy, M. N. et al. Mechanistic studies of a signaling pathway activated by the organic dimerizer FK1012. Chem. Biol. 1, 163-172 (1994).
[0955] 6. Spencer, D. M. et al. Functional analysis of Fas signaling in vivo using synthetic inducers of dimerization. Curr. Biol. 6, 839-847 (1996).
[0956] 7. Belshaw, P. J., Spencer, D. M., Crabtree, G. R. & Schreiber, S. L. Controlling programmed cell death with a cyclophilin-cyclosporin-based chemical inducer of dimerization. Chem. Biol. 3, 731-738 (1996).
[0957] 8. Yang, J. X., Symes, K., Mercola, M. & Schreiber, S. L. Small-molecule control of insulin and PDGF receptor signaling and the role of membrane attachment. Curr. Biol. 8, 11-18 (1998).
[0958] 9. Belshaw, P. J., Ho, S. N., Crabtree, G. R. & Schreiber, S. L. Controlling protein association and subcellular localization with a synthetic ligand that induces heterodimerization of proteins. Proc. Natl. Acad. Sci. 93, 4604-4607 (2002).
[0959] 10. Stockwell, B. R. & Schreiber, S. L. Probing the role of homomeric and heteromeric receptor interactions in TGF-β signaling using small molecule dimerizers. Curr. Biol. 8, 761-773 (2004).
[0960] 11. Spencer, D. M., Graef, I., Austin, D. J., Schreiber, S. L. & Crabtree, G. R. A general strategy for producing conditional alleles of Src-like tyrosine kinases. Proc. Natl. Acad. Sci. 92, 9805-9809 (2006).
[0961] 12. Holsinger, L. J., Spencer, D. M., Austin, D. J., Schreiber, S. L. & Crabtree, G. R. Signal transduction in T lymphocytes using a conditional allele of Sos. Proc. Natl. Acad. Sci. 92, 9810-9814 (2006).
[0962] 13. Myers, M. G. Insulin Signal Transduction and the IRS Proteins. Annu. Rev. Pharmacol. Toxicol. 36, 615-658 (1996).
[0963] 14. Watowich, S. S. The erythropoietin receptor: Molecular structure and hematopoietic signaling pathways. J. Investig. Med. 59, 1067-1072 (2011).
[0964] 15. Blau, C. A., Peterson, K. R., Drachman, J. G. & Spencer, D. M. A proliferation switch for genetically modified cells. Proc. Natd. Acad. Sci. 94, 3076-3081 (2002).
[0965] 16. Clackson, T. et al. Redesigning an FKBP-ligand interface to generate chemical dimerizers with novel specificity. Proc. Natd. Acad. Sci. 95, 10437-10442 (1998).
[0966] 17. Diver, S. T. & Schreiber, S. L. Single-step synthesis of cell-permeable protein dimerizers that activate signal transduction and gene expression. J. Am. Chem. Soc. 119, 5106-5109 (1997).
[0967] 18. Guo, Z. F., Zhang, R. & Liang, F. Sen. Facile functionalization of FK506 for biological studies by the thiol-ene ‘click’ reaction. RSC Adv. 4, 11400-11403 (2014).
[0968] 19. Robinson, D. R., Wu, Y.-M. & Lin, S.-F. The protein tyrosine kinase family of the human genome. Oncogene 19, 5548-5557 (2000).

[0969] L. Use of Prime Editing for Cell Data Recording

[0970] The prime editors and the resulting genomic modifications can also be used to study and record cellular processes and development. For example, the prime editors described herein may be used to record the presence and duration of a stimulus to a cell by providing to the cell a first nucleic acid sequence that encodes a fusion protein with a nucleic acid programmable DNA binding protein (napDNAbp) and a reverse transcriptase, and providing the cell at least a second nucleic acid sequence that encodes a PEgRNA. Either the first, the second, or both nucleic acid sequences are operablely linked to inducible promoters that are responsive to the cell stimulus such that it induces expression of the fusion protein and/or the PEgRNA thereby causing the modification of a target sequence within the cell.

[0971] The prime editors described herein can also be used for cellular barcoding and lineage tracing. For example, by barcoding each cell with a unique genomic barcode, the prime editor can help reveal the cell lineage map by allowing the construction of phylogenetic trees based on the modifications made in one or more target sequence. Starting from progenitor cells, the prime editor system can enable building a cell-fate map for single cells in a whole organism, which can be deciphered by analyzing the modifications made in one or more target sequence. The method for tracing the linage of cells can include providing a nucleic acid encoding a fusion protein with a napDNAbp and a reverse transcriptase, and providing at least one second nucleic acid encoding a PEgRNA. A unique cellular barcode can be generated using the fusion protein and the PEgRNA to create one or more modifications in one or more target sequence, thereby allowing the linage of any cell that arises from the first cell to be traced using the unique cellular barcode. The use of prime editors for both cell data recording and linage tracing is further described in Example 13.

[0972] The prime editors can do perform both lineage tracing and cellular signaling recording by modifying genomic target sequences or integrated pre-designed sequences. Prime editors use a synthetic fusion protein comprising a Cas9 nickase fragment (including but not limited to the SpCas9 H840A variant) and a reverse transcriptase domain, along with an engineered prime editing guide RNA (PEgRNA). Together, these components target a specific genomic sequence or integrated pre-designed sequence and install a pre-determined edit. Because the PEgRNA specifies both the target genomic sequence and the edited outcome, highly specific and controlled genome modification can be achieved simultaneously using multiple PEgRNA within the same cell. Accessible genome modifications include all single nucleotide substitutions, small- to medium-sized sequence insertions, and small- to medium-sized deletions. The versatility of this genome editing technology can enable temporally coupled, signal-specific recording within cells.

[0973] The use of prime editors for cell data recording can include compositions (e.g., nucleic acids), cells, systems, kits, and methods for recording the strength and/or duration of endogenous or exogenous stimuli over the course of a cell's lifetime. The cell data recording system can include a fusion protein consisting of a napDNAbp (e.g., a Cas9 domain) and a reverse transcriptase operably linked to a promoter that induces the expression of the fusion protein to induce changes by creating targeted and sequence-specified genomic insertions, deletions, or mutations in response to a stimulus or change in the cell. In contrast to digital memory devices that store information (e.g., the presence or absence of a stimulus) in one of two distinct states (i.e., “on” or “off”), these cell data recorders can induce permanent marks in cellular DNA in a manner that reflects both the strength (i.e., amplitude) and duration of one or more stimuli. Thus, in some aspects, cell data recording systems have the ability to simultaneously record multiple cell states, including, for example, exposure to a small molecule, a protein, a peptide, an amino acid, a metabolite, an inorganic molecule, an organometallic molecule, an organic molecule, a drug or drug candidate, a sugar, a lipid, a metal, a nucleic acid, a molecule produced during the activation of an endogenous or an exogenous signaling cascade, light, heat, sound, pressure, mechanical stress, shear stress, or a virus or other microorganism. These cell data recorders can employ sequencing technologies (e.g., high-throughput sequencing) to measure readout (e.g., changes in cellular DNA) and are not dependent on large cell populations for both the recording of a stimulus or the readout of the change(s) in cellular DNA induced by the stimulus.

[0974] In general, the cell data recorder systems provided herein for use in a cell comprise a fusion protein consisting of a napDNAbp and a reverse transcriptase, wherein the nucleic acid sequence encoding the fusion plasmid is operably linked to a promoter (e.g., an inducible promoter or a constitutive promoter). When a stimulus is present, or a change in cell state occurs, the stimulus induces the expression of the fusion protein. Also present within the cell are one or more nucleic acids encoding at least one PEgRNA that associate with the napDNAbp and directs the napDNAbp or the fusion protein to a target sequence (i.e., the PEgRNA is complementary to a target sequence). The nucleic acid encoding PEgRNA may also be, or may alternatively be, operably linked to a promoter (e.g., an inducible promoter or a constitutive promoter). Under the correct stimulus, or correct set of stimuli, both the fusion protein and the PEgRNA are expressed in the cell, and the PEgRNA associates with the fusion protein to direct it to a target sequence. This target sequence records the activity of the prime editor, thereby recording the presence of a stimulus, or a set of stimuli, or a change in cell state. More than one PEgRNA sequence can also be present in the cell, and these additional PEgRNA sequences, which can direct the fusion protein to distinct target sequences, can each be operably linked to a promoter that senses the presence of a different stimulus, allowing complex cell data recorder systems to be constructed for the ordered recording of the presence and duration of a stimulus, or set of stimuli. In some cases, one or more of the components of the cell data recorder system (e.g., fusion protein and PEgRNA) may be constitutively expressed in the cell. Exemplary components of the cell data recorder system for use with the compositions are described herein. Additional suitable combinations of components provided herein will be apparent to a person of ordinary skill in the art based on this disclosure and knowledge in the field, and thus are embraced by the scope of this disclosure.

[0975] Repeated modification of a DNA target that can be sequenced by targeted amplicon sequencing and/or RNA sequencing (which is particular value for single cell recording experiments) can be used to record a host of important biological processes, including activation of signaling cascades, metabolic states, and cellular differentiation programs. Connecting internal and external cellular signals to sequence modification in the genome is possible for any signal for which a signal responsive promotor exists. In some embodiments, the promoter is a promoter suitable for use in a prokaryotic system (i.e., a bacterial promoter). In some embodiments, the promoter is a promoter suitable for use in a eukaryotic system (i.e., a eukaryotic promoter). In some embodiments, the promoter is a promoter suitable for use in a mammalian (e.g., human) system (i.e., a mammalian promoter). In some embodiments, the promoter is induced by a stimulus (i.e., an inducible promoter). In some embodiments, the stimulus is a small molecule, a protein, a peptide, an amino acid, a metabolite, an inorganic molecule, an organometallic molecule, an organic molecule, a drug or drug candidate, a sugar, a lipid, a metal, a nucleic acid, a molecule produced during the activation of an endogenous or an exogenous signaling cascade, light, heat, sound, pressure, mechanical stress, shear stress, or a virus or other microorganism, change in pH, or change in oxidation/reduction state. In some embodiments, the stimulus is a light. In some embodiments, the stimulus is a virus. In some embodiments, the stimulus is a small molecule. In some embodiments, the stimulus is an antibiotic. In some embodiments, the stimulus is anhydrotetracycline or doxycycline. In some embodiments, the stimulus is a sugar. In some embodiments, the stimulus is arabinose, rhamnose, or IPTG. In some embodiments, the stimulus is a signaling molecule produced during an activated signaling cascade (e.g., beta-catenin produced during an activated Wnt signaling cascade). Additional promoters that detect signaling molecules can be generated to induce the expression of the nucleic acid sequence operably linked to the promoter, for example, promoters that record an endogenous pathway, including immune response (IL-2 promoter), a cAMP responsive element (CREB), NFκB signaling, interferon response, P53 (DNA damage), Sox2, TGF-β signaling (SMAD), Erk (e.g., from an activated Ras/Raf/Mek/Erk cascade), PI3K/AKT (e.g., from an activated Ras/PI3K/Akt cascade), heat shock, Notch signaling, Oct4, an aryl hydrocarbon receptor, or an AP-1 transcription factor. In some embodiments, the promoter is a constitutive promoter. In some embodiments, the promoter is a promoter listed in Table 3. Additional suitable promoters for use in both prokaryotic and eukaryotic systems will be apparent to those of ordinary skill in the art based on this disclosure and knowledge in the field, and are within the scope of the present disclosure.

[0976] Prime editors can also be used to trace cellular lineages. Repeated sequence modifications can be used to generate unique cellular barcodes to track individual cells. The arrays of barcodes, their order, and size can all be used to infer cellular lineages. For example, the insertion of homology sequences (i.e., sequences 3′ of the Cas9 nick location), and in particular homology sequences with associated barcodes, appear to be particularly useful lineage prime editor strategies. These systems can be designed such that successive rounds of editing result in the insertion of a barcode from a PEgRNA cassette that cannot be modified by other PEgRNA editing events in the same cell. The barcoding system can utilize multiple barcodes that can be associated with a given stimulus. This system can preserve the majority of the target protospacers but alter the seed sequence, PAM, and downstream adjacent nucleotides. This enables multiple signals to be connected to one editing locus without significant re-designing of the PEgRNAs being used. The strategy can enable multiplexed barcode insertions in response to a large number of cellular stimuli (either internal or external) at a single locus. It could enable the recording of intensity, duration, and order of as many signals as there exist unique barcodes (which can be designed with multiple N nucleotides to generate 4\hat{ }N possible barcodes, for example a 5-nt barcode would enable recording of 4\hat{ }5 or 1024 unique signals at once). This system can be used both in vitro and in vivo.

[0977] M. Use of Prime Editing to Modulate Biomolecule Activity

[0978] The use of prime editors described herein may also be used to regulate the subcellular localization and modification states of biomolecules, such as DNA, RNA, and proteins. Specific biological functions, like transcriptional control, cellular metabolism, and signal transduction cascades, are carefully orchestrated in particular locations within the cell. The ability to traffic proteins to these and other unique cellular compartments could provide an opportunity to alter a number of biological processes.

[0979] Accordingly, prime editing can be used to install genetically encoded handles that will allow for altered modification states and the subcellular trafficking of biomolecules with a genetically encoded signal (e.g. proteins, lipids, sugars, and nucleic acids). In various embodiments, the target biomolecules for prime editor-mediated medication are DNA. For example, DNA could be modified by installing a number of DNA sequences that change the accessibility of the target locus, which could lead to either increased or decreased transcription of desired sequences. In other embodiments, the target biomolecules for prime editor-mediated medication are RNA. For example, the activity of RNA can be modified by changing its cellular localization, interacting partners, structural dynamics, or thermodynamics of folding. In yet other embodiments, the target biomolecules for prime editor-mediated medication are protein. Proteins can be modified to impact post-translational modifications, protein motifs can be installed to change the subcellular localization of the protein, or proteins can be modified to either create or destroy their ability to exist within protein-protein complexation events.

[0980] This application of prime editing can be further described in Example 14.

### DNA Modifications

[0981] One target biomolecule for PE-mediated modification is DNA. Modifications to DNA could be made to install a number of DNA sequences that change the accessibility of the target locus. Chromatin accessibility controls gene transcriptional output. Installation of marks to recruit chromatin compacting enzymes should decrease the transcriptional output of neighboring genes, while installation of sequences associated with chromatin opening should make regions more accessible and in turn increase transcription. Installation of more complex sequence motifs that mirror native regulatory sequences should provide more nuanced and biologically sensitive control than the currently available dCas9 fusions to different epigenetic reader, writer, or eraser enzymes-tools that typically install large numbers of a single type of mark that may not have a particular biological antecedent. Installation of sequences that will bring two loci into close proximity, or bring loci into contact with the nuclear membrane, should also alter the transcriptional output of those loci as has been demonstrated in the burgeoning field of 3-D genomic architecture.

### RNA Modifications

[0982] Modifications to RNAs can also be made to alter their activity by changing their cellular localization, interacting partners, structural dynamics, or thermodynamics of folding. Installation of motifs that will cause translational pausing or frameshifting could change the abundance of mRNA species through various mRNA processing mechanisms. Modifying consensus splice sequences would also alter the abundance and prevalence of different RNA species. Changing the relative ratio of different splice isoforms would predictably lead to a change in the ratio of protein translation products, and this could be used to alter many biological pathways. For instance, shifting the balance of mitochondrial versus nuclear DNA repair proteins would alter the resilience of different cancers to chemotherapeutic reagents. Furthermore, RNAs could be modified with sequences that enable binding to novel protein targets. A number of RNA aptamers have been developed that bind with high affinity to cellular proteins. Installation of one of these aptamers could be used to either sequester different RNA species through binding to a protein target that will prevent their translation, biological activity, or to bring RNA species to specific subcellular compartments. Biomolecule degradation is another class of localization modification.

[0983] For example, RNA methylation is used to regulate RNAs within the cell. Consensus motifs for methylation could be introduced into target RNA coding sequences with PE. RNAs could also be modified to include sequences that direct nonsense mediated decay machinery or other nucleic acid metabolism pathways to degrade the target RNA species would change the pool of RNAs in a cell. Additionally, RNA species could be modified to alter their aggregation state. Sequences could be installed on single RNAs of interest or multiple RNAs to generate RNA tangles that would render them ineffective substrates for translation or signaling.

### Protein Modifications

[0984] Modifications to proteins via post-translational modification (PTM) also represent an important class of biomolecule manipulation that can be carried out with PE. As with RNA species, changing the abundance of proteins in a cell is an important capability of PE. Editing can be done to install stop codons in an open reading frame—this will eliminate full-length product from being produced by the edited DNA sequence. Alternatively, peptide motifs can be installed that cause the rate of protein degradation to be altered for a target protein. Installation of degradation tags into a gene body could be used to alter the abundance of a protein in a cell. Moreover, introduction of degrons that are induced by small molecules could enable temporal control over protein degradation. This could have important implications for both research and therapeutics as researchers could readily assess whether small molecule-mediated therapeutic protein degradation of a given target was a viable therapeutic strategy. Protein motifs could also be installed to change the subcellular localization of a protein. Amino acid motifs can be installed to preferentially traffic proteins to a number of subcellular compartments including the nucleus, mitochondria, cell membrane, peroxisome, lysosome, proteasome, exosome, and others.

[0985] Installing or destroying motifs modified by PTM machinery can alter protein post-translational modifications. Phosphorylation, ubiquitylation, glycosylation, lipidation (e.g. farnesylation, myristoylation, palmitoylation, prenylation, GPI anchors), hydroxylation, methylation, acetylation, crotonylation, SUMOylation, disulfide bond formations, side chain bond cleavage events, polypeptide backbone cleavage events (proteolysis), and a number of other protein PTMs have been identified. These PTMs change protein function, often by changing subcellular localization. Indeed, kinases often activate downstream signaling cascades via phosphorylation events. Removal of the target phosphosite would prevent signal transduction. The ability to site-specifically ablate or install any PTM motif while retaining full-length protein expression would be an important advance for both basic research and therapeutics. The sequence installation scope and target window of PE make it well suited for broad PTM modification space.

[0986] Removal of lipidation sites should prevent the trafficking of proteins to cell membranes. A major limitation to current therapeutics that target post-translational modification processes is their specificity. Farnesyl transferase inhibitors have been tested extensively for their ability to eliminate KRAS localization at cell membranes. Unfortunately, global inhibition of farnesylation comes with numerous off target effects that have prevented broad use of these small molecules. Similarly, specific inhibition of protein kinases with small molecules can be very challenging due to the large size of the human genome and similarities between various kinases. PE offers a potential solution to this specificity problem, as it enables inhibition of modification of the target protein by ablation of the modification site instead of global enzyme inhibition. For example, removal of the lapidated peptide motif in KRAS would be a targeted approach that could be used in place of farnesyl transferase inhibition. This approach is the functional inverse of inhibiting a target protein activity by installing a lipid-targeting motif on a protein not designed to be membrane bound.

[0987] PE can also be used to instigate protein-protein complexation events. Proteins often function within complexes to execute their biological activity. PE can be used to either create or destroy the ability of proteins to exist within these complexes. To eliminate complex formation events, amino acid substitutions or insertions along the protein: protein interface could be installed to disfavor complexation. SSX18 is a protein component of the BAF complex, an important histone-remodeling complex. Mutations in SSX18 drive synovial sarcomas. PE could be used to install side chains that prevent SSX18 from binding to its protein partners in the complex to prevent its oncogenic activity. PE could also be used to remove the pathogenic mutations to restore WT activity of this protein. Alternatively, PE could be used to keep proteins within either their native complex or to drag them to participate in interactions that are unrelated to their native activity to inhibit their activity. Forming complexes that maintain one interaction state over another could represent an important therapeutic modality. Altering protein: protein interfaces to decrease the Kd of the interaction would keep those proteins stuck to one another longer. As protein complexes can have multiple signaling complexes, like n-myc driving neuroblastoma signaling cascades in disease but otherwise participating in healthy transcriptional control in other cells. PE could be used to install mutations that drive n-myc association with healthy interactions partners and decrease its affinity for oncogenic interaction partners.

### References Cited in Section I

[0988] Each of the following references are incorporated herein by reference.
[0989] 1. Selective Target Protein Degradation via Phthalimide Conjugation. Winter et al. Science. Author manuscript; available in PMC 2016 Jul. 8.
[0990] 2. Reversible disruption of mSWI/SNF (BAF) complexes by the SS18-SSX oncogenic fusion in synovial sarcoma. Kadoch and Crabtree. Cell. 2013 Mar. 28; 153(1):71-85. doi: 10.1016/j.cell.2013.02.036.
[0991] 3. Ribosomal frameshifting and transcriptional slippage: From genetic steganography and cryptography to adventitious use. Atkins et al. Nucleic Acids Research, Volume 44, Issue 15, 6 Sep. 2016, Pages 7007-7078.
[0992] 4. Transcriptional Regulation and its Misregulation in Disease. Lee and Young. Cell. Author manuscript; available in PMC 2014 Mar. 14.
[0993] 5. Protein localization in disease and therapy. Mien-Chie Hung, Wolfgang Link Journal of Cell Science 2011 124: 3381-3392.
[0994] 6. Loss of post-translational modification sites in disease. Li et al. Pac Symp Biocomput. 2010:337-47. PTMD: A Database of Human Disease-associated Post-translational Modifications. Xu et al. Genomics Proteomics Bioinformatics. 2018 August; 16(4):244-251. Epub 2018 Sep. 21.
[0995] 7. Post-transcriptional gene regulation by mRNA modifications. Zhao et al. Nature Reviews Molecular Cell Biology volume 18, pages 31-42 (2017).

[0996] N. Improved Design Aspects of PEgRNAs for Prime Editing

[0997] In other embodiments, the prime editing system may include the use of PEgRNA designs and strategies that can improve prime editing efficiency. These strategies seek to overcome some issues that exist because of the multi-step process required for prime editing. For example, unfavorable RNA structures that can form within the PEgRNA can result in the inhibition of DNA edits being copied from the PEgRNA into the genomic locus. These limitations could be overcome through the redesign and engineering of the PEgRNA component. These redesigns could improve prime editor efficiency, and could allow the installation of longer inserted sequences into the genome.

[0998] Accordingly, in various embodiments, the PEgRNA designs can result in longer PEgRNAs by enabling efficient expression of functional PEgRNAs from non-polymerase III (pol III) promoters, which would avoid the need for burdensome sequence requirements. In other embodiments, the core, Cas9-binding PEgRNA scaffold can be improved to improve efficacy of the system. In yet other embodiments, modifications can be made to the PEgRNA to improve reverse transcriptase (RT) processivity, which would enable the insertion of longer sequences at the targeted genomic loci. In other embodiments, RNA motifs can be added to the 5′ and/or 3′ termini of the PEgRNA to improve stability, enhance RT processivity, prevent misfolding of the PEgRNA, and/or recruit additional factors important for genome editing. In yet another embodiment, a platform is provided for the evolution of PEgRNAs for a given sequence target that could improve the PEgRNA scaffold and enhance prime editor efficiency. These designs could be used to improve any PEgRNA recognized by any Cas9 or evolved variant thereof.

[0999] This application of prime editing can be further described in Example 15.

[1000] The PEgRNAs may include additional design improvements that may modify the properties and/or characteristics of PEgRNAs thereby improving the efficacy of prime editing. In various embodiments, these improvements may belong to one or more of a number of different categories, including but not limited to: (1) designs to enable efficient expression of functional PEgRNAs from non-polymerase III (pol III) promoters, which would enable the expression of longer PEgRNAs without burdensome sequence requirements; (2) improvements to the core, Cas9-binding PEgRNA scaffold, which could improve efficacy; (3) modifications to the PEgRNA to improve RT processivity, enabling the insertion of longer sequences at targeted genomic loci; and (4) addition of RNA motifs to the 5′ or 3′ termini of the PEgRNA that improve PEgRNA stability, enhance RT processivity, prevent misfolding of the PEgRNA, or recruit additional factors important for genome editing.

[1001] In one embodiment, PEgRNA could be designed with polIII promoters to improve the expression of longer-length PEgRNA with larger extension arms. sgRNAs are typically expressed from the U6 snRNA promoter. This promoter recruits pol III to express the associated RNA and is useful for expression of short RNAs that are retained within the nucleus. However, pol III is not highly processive and is unable to express RNAs longer than a few hundred nucleotides in length at the levels required for efficient genome editing. Additionally, pol III can stall or terminate at stretches of U's, potentially limiting the sequence diversity that could be inserted using a PEgRNA. Other promoters that recruit polymerase II (such as pCMV) or polymerase I (such as the U1 snRNA promoter) have been examined for their ability to express longer sgRNAs. However, these promoters are typically partially transcribed, which would result in extra sequence 5′ of the spacer in the expressed PEgRNA, which has been shown to result in markedly reduced Cas9:sgRNA activity in a site-dependent manner. Additionally, while pol III-transcribed PEgRNAs can simply terminate in a run of 6-7 U's, PEgRNAs transcribed from pol II or pol I would require a different termination signal. Often such signals also result in polyadenylation, which would result in undesired transport of the PEgRNA from the nucleus. Similarly, RNAs expressed from pol II promoters such as pCMV are typically 5′-capped, also resulting in their nuclear export.

[1002] Previously, Rinn and coworkers screened a variety of expression platforms for the production of long-noncoding RNA-(lncRNA) tagged sgRNAs¹⁸³. These platforms include RNAs expressed from pCMV and that terminate in the ENE element from the MALAT1 ncRNA from humans¹⁸⁴, the PAN ENE element from KSHV¹⁸⁵, or the 3′ box from U1 snRNA¹⁸⁶. Notably, the MALAT1 ncRNA and PAN ENEs form triple helices protecting the polyA-tail^{184, 187}. These constructs could also enhance RNA stability. It is contemplated that these expression systems will also enable the expression of longer PEgRNAs.

[1003] In addition, a series of methods have been designed for the cleavage of the portion of the pol II promoter that would be transcribed as part of the PEgRNA, adding either a self-cleaving ribozyme such as the hammerhead¹⁸⁸, pistol¹⁸⁹, hatchet¹⁸⁹, hairpin¹⁹⁰, VS¹⁹¹, twister¹⁹², or twister sister¹⁹² ribozymes, or other self-cleaving elements to process the transcribed guide, or a hairpin that is recognized by Csy4¹⁹³ and also leads to processing of the guide. Also, it is hypothesized that incorporation of multiple ENE motifs could lead to improved PEgRNA expression and stability, as previously demonstrated for the KSHV PAN RNA and element¹⁸⁵. It is also anticipated that circularizing the PEgRNA in the form of a circular intronic RNA (ciRNA) could also lead to enhanced RNA expression and stability, as well as nuclear localization¹⁹⁴.

[1004] In various embodiments, the PEgRNA may include various above elements, as exemplified by the following sequence.

Non-limiting example 1 - PEgRNA expression platform
consisting of pCMV, Csy4 hairpin, the PEgRNA, and
MALAT1 ENE
(SEQ ID NO: 501)
TAGTTATTAATAGTAATCAATTACGGGGTCATTAGTTCATAGCCCATATAT
GGAGTTCCGCGTTACATAACTTACGGTAAATGGCCCGCCTGGCTGACCGCC
CAACGACCCCCGCCCATTGACGTCAATAATGACGTATGTTCCCATAGTAAC
GCCAATAGGGACTTTCCATTGACGTCAATGGGTGGAGTATTTACGGTAAAC
TGCCCACTTGGCAGTACATCAAGTGTATCATATGCCAAGTACGCCCCCTAT
TGACGTCAATGACGGTAAATGGCCCGCCTGGCATTATGCCCAGTACATGAC
CTTATGGGACTTTCCTACTTGGCAGTACATCTACGTATTAGTCATCGCTAT
TACCATGGTGATGCGGTTTTGGCAGTACATCAATGGGCGTGGATAGCGGTT
TGACTCACGGGGATTTCCAAGTCTCCACCCCATTGACGTCAATGGGAGTTT
GTTTTGGCACCAAAATCAACGGGACTTTCCAAAATGTCGTAACAACTCCGC
CCCATTGACGCAAATGGGCGGTAGGCGTGTACGGTGGGAGGTCTATATAAG
CAGAGCTGGTTTAGTGAACCGTCAGATCGTTCACTGCCGTATAGGCAGGGC
CCAGACTGAGCACGTGAGTTTTAGAGCTAGAAATAGCAAGTTAAAATAAGG
CTAGTCCGTTATCAACTTGAAAAAGTGGGACCGAGTCGGTCCTCTGCCATC
AAAGCGTGCTCAGTCTGTTTTAGGGTCATGAAGGTTTTTCTTTTCCTGAGA
AAACAACACGTATTGTTTTCTCAGGTTTTGCTTTTTGGCCTTTTTCTAGCT
TAAAAAAAAAAAAAGCAAAAGATGCTGGTGGTTGGCACTCCTGGTTTCCAG
GACGGGGTTCAAATCCCTGCGGCGTCTTTGCTTTGACT
Non-limiting example 2 - PEgRNA expression platform
consisting of pCMV, Csy4 hairing, the PEgRNA, and
PAN ENE
(SEQ ID NO: 502)
TAGTTATTAATAGTAATCAATTACGGGGTCATTAGTTCATAGCCCATATAT
GGAGTTCCGCGTTACATAACTTACGGTAAATGGCCCGCCTGGCTGACCGCC
CAACGACCCCCGCCCATTGACGTCAATAATGACGTATGTTCCCATAGTAAC
GCCAATAGGGACTTTCCATTGACGTCAATGGGTGGAGTATTTACGGTAAAC
TGCCCACTTGGCAGTACATCAAGTGTATCATATGCCAAGTACGCCCCCTAT
TGACGTCAATGACGGTAAATGGCCCGCCTGGCATTATGCCCAGTACATGAC
CTTATGGGACTTTCCTACTTGGCAGTACATCTACGTATTAGTCATCGCTAT
TACCATGGTGATGCGGTTTTGGCAGTACATCAATGGGCGTGGATAGCGGTT
TGACTCACGGGGATTTCCAAGTCTCCACCCCATTGACGTCAATGGGAGTTT
GTTTTGGCACCAAAATCAACGGGACTTTCCAAAATGTCGTAACAACTCCGC
CCCATTGACGCAAATGGGCGGTAGGCGTGTACGGTGGGAGGTCTATATAAG
CAGAGCTGGTTTAGTGAACCGTCAGATCGTTCACTGCCGTATAGGCAGGGC
CCAGACTGAGCACGTGAGTTTTAGAGCTAGAAATAGCAAGTTAAAATAAGG
CTAGTCCGTTATCAACTTGAAAAAGTGGGACCGAGTCGGTCCTCTGCCATC
AAAGCGTGCTCAGTCTGTTTTGTTTTGGCTGGGTTTTTCCTTGTTCGCACC
GGACACCTCCAGTGACCAGACGGCAAGGTTTTTATCCCAGTGTATATTGGA
AAAACATGTTATACTTTTGACAATTTAACGTGCCTAGAGCTCAAATTAAAC
TAATACCATAACGTAATGCAACTTACAACATAAATAAAGGTCAATGTTTAA
TCCATAAAAAAAAAAAAAAAAAAA
Non-limiting example 3 - PEgRNA expression platform
consisting of pCMV, Csy4 hairing, the PEgRNA, and
3xPAN ENE
(SEQ ID NO: 503)
TAGTTATTAATAGTAATCAATTACGGGGTCATTAGTTCATAGCCCATATAT
GGAGTTCCGCGTTACATAACTTACGGTAAATGGCCCGCCTGGCTGACCGCC
CAACGACCCCCGCCCATTGACGTCAATAATGACGTATGTTCCCATAGTAAC
GCCAATAGGGACTTTCCATTGACGTCAATGGGTGGAGTATTTACGGTAAAC
TGCCCACTTGGCAGTACATCAAGTGTATCATATGCCAAGTACGCCCCCTAT
TGACGTCAATGACGGTAAATGGCCCGCCTGGCATTATGCCCAGTACATGAC
CTTATGGGACTTTCCTACTTGGCAGTACATCTACGTATTAGTCATCGCTAT
TACCATGGTGATGCGGTTTTGGCAGTACATCAATGGGCGTGGATAGCGGTT
TGACTCACGGGGATTTCCAAGTCTCCACCCCATTGACGTCAATGGGAGTTT
GTTTTGGCACCAAAATCAACGGGACTTTCCAAAATGTCGTAACAACTCCGC
CCCATTGACGCAAATGGGCGGTAGGCGTGTACGGTGGGAGGTCTATATAAG
CAGAGCTGGTTTAGTGAACCGTCAGATCGTTCACTGCCGTATAGGCAGGGC
CCAGACTGAGCACGTGAGTTTTAGAGCTAGAAATAGCAAGTTAAAATAAGG
CTAGTCCGTTATCAACTTGAAAAAGTGGGACCGAGTCGGTCCTCTGCCATC
AAAGCGTGCTCAGTCTGTTTTGTTTTGGCTGGGTTTTTCCTTGTTCGCACC
GGACACCTCCAGTGACCAGACGGCAAGGTTTTTATCCCAGTGTATATTGGA
AAAACATGTTATACTTTTGACAATTTAACGTGCCTAGAGCTCAAATTAAAC
TAATACCATAACGTAATGCAACTTACAACATAAATAAAGGTCAATGTTTAA
TCCATAAAAAAAAAAAAAAAAAAAACACACTGTTTTGGCTGGGTTTTTCCT
TGTTCGCACCGGACACCTCCAGTGACCAGACGGCAAGGTTTTTATCCCAGT
GTATATTGGAAAAACATGTTATACTTTTGACAATTTAACGTGCCTAGAGCT
CAAATTAAACTAATACCATAACGTAATGCAACTTACAACATAAATAAAGGT
CAATGTTTAATCCATAAAAAAAAAAAAAAAAAAATCTCTCTGTTTTGGCTG
GGTTTTTCCTTGTTCGCACCGGACACCTCCAGTGACCAGACGGCAAGGTTT
TTATCCCAGTGTATATTGGAAAAACATGTTATACTTTTGACAATTTAACGT
GCCTAGAGCTCAAATTAAACTAATACCATAACGTAATGCAACTTACAACAT
AAATAAAGGTCAATGTTTAATCCATAAAAAAAAAAAAAAAAAAA
Non-limiting example 4 - PEgRNA expression platform
consisting of pCMV, Csy4 hairing, the PEgRNA, and
3′ box
(SEQ ID NO: 504)
TAGTTATTAATAGTAATCAATTACGGGGTCATTAGTTCATAGCCCATATAT
GGAGTTCCGCGTTACATAACTTACGGTAAATGGCCCGCCTGGCTGACCGCC
CAACGACCCCCGCCCATTGACGTCAATAATGACGTATGTTCCCATAGTAAC
GCCAATAGGGACTTTCCATTGACGTCAATGGGTGGAGTATTTACGGTAAAC
TGCCCACTTGGCAGTACATCAAGTGTATCATATGCCAAGTACGCCCCCTAT
TGACGTCAATGACGGTAAATGGCCCGCCTGGCATTATGCCCAGTACATGAC
CTTATGGGACTTTCCTACTTGGCAGTACATCTACGTATTAGTCATCGCTAT
TACCATGGTGATGCGGTTTTGGCAGTACATCAATGGGCGTGGATAGCGGTT
TGACTCACGGGGATTTCCAAGTCTCCACCCCATTGACGTCAATGGGAGTTT
GTTTTGGCACCAAAATCAACGGGACTTTCCAAAATGTCGTAACAACTCCGC
CCCATTGACGCAAATGGGCGGTAGGCGTGTACGGTGGGAGGTCTATATAAG
CAGAGCTGGTTTAGTGAACCGTCAGATCGTTCACTGCCGTATAGGCAGGGC
CCAGACTGAGCACGTGAGTTTTAGAGCTAGAAATAGCAAGTTAAAATAAGG
CTAGTCCGTTATCAACTTGAAAAAGTGGGACCGAGTCGGTCCTCTGCCATC
AAAGCGTGCTCAGTCTGTTTGTTTCAAAAGTAGACTGTACGCTAAGGGTCA
TATCTTTTTTTGTTTGGTTTGTGTCTTGGTTGGCGTCTTAAA
Non-limiting example 5 - PEgRNA expression platform
consisting of pU1, Csy4 hairping, the PEgRNA, and
3′ box
(SEQ ID NO: 505)
CTAAGGACCAGCTTCTTTGGGAGAGAACAGACGCAGGGGCGGGAGGGAAAA
AGGGAGAGGCAGACGTCACTTCCCCTTGGCGGCTCTGGCAGCAGATTGGTC
GGTTGAGTGGCAGAAAGGCAGACGGGGACTGGGCAAGGCACTGTCGGTGAC
ATCACGGACAGGGCGACTTCTATGTAGATGAGGCAGCGCAGAGGCTGCTGC
TTCGCCACTTGCTGCTTCACCACGAAGGAGTTCCCGTGCCCTGGGAGCGGG
TTCAGGACCGCTGATCGGAAGTGAGAATCCCAGCTGTGTGTCAGGGCTGGA
AAGGGCTCGGGAGTGCGCGGGGCAAGTGACCGTGTGTGTAAAGAGTGAGGC
GTATGAGGCTGTGTCGGGGCAGAGGCCCAAGATCTCAGTTCACTGCCGTAT
AGGCAGGGCCCAGACTGAGCACGTGAGTTTTAGAGCTAGAAATAGCAAGTT
AAAATAAGGCTAGTCCGTTATCAACTTGAAAAAGTGGGACCGAGTCGGTCC
TCTGCCATCAAAGCGTGCTCAGTCTGTTTCAGCAAGTTCAGAGAAATCTGA
ACTTGCTGGATTTTTGGAGCAGGGAGATGGAATAGGAGCTTGCTCCGTCCA
CTCCACGCATCGACCTGGTATTGCAGTACCTCCAGGAACGGTGCACCCACT
TTCTGGAGTTTCAAAAGTAGACTGTACGCTAAGGGTCATATCTTTTTTTGT
TTGGTTTGTGTCTTGGTTGGCGTCTTAAA

[1005] In various other embodiments, the PEgRNA may be improved by introducing improvements to the scaffold or core sequences. This can be done by introducing known

[1006] The core, Cas9-binding PEgRNA scaffold can likely be improved to enhance PE activity. Several such approaches have already been demonstrated. For instance, the first pairing element of the scaffold (P1) contains a GTTTT-AAAAC (SEQ ID NO: 3939) pairing element. Such runs of Ts have been shown to result in pol III pausing and premature termination of the RNA transcript. Rational mutation of one of the T-A pairs to a G-C pair in this portion of P1 has been shown to enhance sgRNA activity, suggesting this approach would also be feasible for PEgRNAs¹⁹⁵. Additionally, increasing the length of P1 has also been shown to enhance sgRNA folding and lead to improved activity¹⁹⁵, suggesting it as another avenue for the improvement of PEgRNA activity. Example improvements to the core can include:

PEgRNA containing a 6 nt extension to P1
(SEQ ID NO: 228)
GGCCCAGACTGAGCACGTGAGTTTTAGAGCTAGCTCATGAAAATGAGCTAG
CAAGTTAAAATAAGGCTAGTCCGTTATCAACTTGAAAAAGTGGGACCGAGT
CGGTCCTCTGCCATCAAAGCGTGCTCAGTCTGTTTTTTT
PEgRNA containing a T-A to G-C mutation within P1
(SEQ ID NO: 229)
GGCCCAGACTGAGCACGTGAGTTTGAGAGCTAGAAATAGCAAGTTTAAATA
AGGCTAGTCCGTTATCAACTTGAAAAAGTGGGACCGAGTCGGTCCTCTGCC
ATCAAAGCGTGCTCAGTCTGTTTTTTT

[1007] In various other embodiments, the PEgRNA may be improved by introducing modifications to the edit template region. As the size of the insertion templated by the PEgRNA increases, it is more likely to be degraded by endonucleases, undergo spontaneous hydrolysis, or fold into secondary structures unable to be reverse-transcribed by the RT or that disrupt folding of the PEgRNA scaffold and subsequent Cas9-RT binding. Accordingly, it is likely that modification to the template of the PEgRNA might be necessary to affect large insertions, such as the insertion of whole genes. Some strategies to do so include the incorporation of modified nucleotides within a synthetic or semi-synthetic PEgRNA that render the RNA more resistant to degradation or hydrolysis or less likely to adopt inhibitory secondary structures¹⁹⁶. Such modifications could include 8-aza-7-deazaguanosine, which would reduce RNA secondary structure in G-rich sequences; locked-nucleic acids (LNA) that reduce degradation and enhance certain kinds of RNA secondary structure; 2′-O-methyl, 2′-fluoro, or 2′-O-methoxyethoxy modifications that enhance RNA stability. Such modifications could also be included elsewhere in the PEgRNA to enhance stability and activity. Alternatively or additionally, the template of the PEgRNA could be designed such that it both encodes for a desired protein product and is also more likely to adopt simple secondary structures that are able to be unfolded by the RT. Such simple structures would act as a thermodynamic sink, making it less likely that more complicated structures that would prevent reverse transcription would occur. Finally, one could also split the template into two, separate PEgRNAs. In such a design, a PE would be used to initiate transcription and also recruit a separate template RNA to the targeted site via an RNA-binding protein fused to Cas9 or an RNA recognition element on the PEgRNA itself such as the MS2 aptamer. The RT could either directly bind to this separate template RNA, or initiate reverse transcription on the original PEgRNA before swapping to the second template. Such an approach could enable long insertions by both preventing misfolding of the PEgRNA upon addition of the long template and also by not requiring dissociation of Cas9 from the genome for long insertions to occur, which could possibly be inhibiting PE-based long insertions.

[1008] In still other embodiments, the PEgRNA may be improved by introducing additional RNA motifs at the 5′ and 3′ termini of the PEgRNAs. Several such motifs—such as the PAN ENE from KSHV and the ENE from MALAT1 were discussed above as possible means to terminate expression of longer PEgRNAs from non-pol III promoters. These elements form RNA triple helices that engulf the polyA tail, resulting in their being retained within the nucleus^{184,187}. However, by forming complex structures at the 3′ terminus of the PEgRNA that occlude the terminal nucleotide, these structures would also likely help prevent exonuclease-mediated degradation of PEgRNAs.

[1009] Other structural elements inserted at the 3′ terminus could also enhance RNA stability, albeit without enabling termination from non-pol III promoters. Such motifs could include hairpins or RNA quadruplexes that would occlude the 3′ terminus¹⁹⁷, or self-cleaving ribozymes such as HDV that would result in the formation of a 2′-3′-cyclic phosphate at the 3′ terminus and also potentially render the PEgRNA less likely to be degraded by exonucleases¹⁹⁸. Inducing the PEgRNA to cyclize via incomplete splicing—to form a ciRNA—could also increase PEgRNA stability and result in the PEgRNA being retained within the nucleus¹⁹⁴.

[1010] Additional RNA motifs could also improve RT processivity or enhance PEgRNA activity by enhancing RT binding to the DNA-RNA duplex. Addition of the native sequence bound by the RT in its cognate retroviral genome could enhance RT activity¹⁹⁹. This could include the native primer binding site (PBS), polypurine tract (PPT), or kissing loops involved in retroviral genome dimerization and initiation of transcription¹⁹⁹.

[1011] Addition of dimerization motifs—such as kissing loops or a GNRA tetraloop/tetraloop receptor pair²⁰⁰—at the 5′ and 3′ termini of the PEgRNA could also result in effective circularization of the PEgRNA, improving stability. Additionally, it is envisioned that addition of these motifs could enable the physical separation of the PEgRNA spacer and primer, prevention occlusion of the spacer which would hinder PE activity. Short 5′ or 3′ extensions to the PEgRNA that form a small toehold hairpin in the spacer region could also compete favorably against the annealing region of the PEgRNA binding the spacer. Finally, kissing loops could also be used to recruit other template RNAs to the genomic site and enable swapping of RT activity from one RNA to the other. Example improvements include, but are not limited to:

PEgRNA-HDV fusion
(SEQ ID NO: 230)
GGCCCAGACTGAGCACGTGAGTTTTAGAGCTAGAAATAGCAAGTTAAAATA
AGGCTAGTCCGTTATCAACTTGAAAAAGTGGGACCGAGTCGGTCCTCTGCC
ATCAAAGCGTGCTCAGTCTGGGCCGGCATGGTCCCAGCCTCCTCGCTGGCG
CCGGCTGGGCAACATGCTTCGGCATGGCGAATGGGACTTTTTTT
PEgRNA-MMLV kissing loop
(SEQ ID NO: 231)
GGTGGGAGACGTCCCACCGGCCCAGACTGAGCACGTGAGTTTTAGAGCTAG
AAATAGCAAGTTAAAATAAGGCTAGTCCGTTATCAACTTGAAAAAGTGGGA
CCGAGTCGGTCCTCTGCCATCAAAGCTTCGACCGTGCTCAGTCTGGTGGGA
GACGTCCCACCTTTTTTT
PEgRNA-VS ribozyme kissing loop
(SEQ ID NO: 232)
GAGCAGCATGGCGTCGCTGCTCACGGCCCAGACTGAGCACGTGAGTTTTAG
AGCTAGAAATAGCAAGTTAAAATAAGGCTAGTCCGTTATCAACTTGAAAAA
GTGGGACCGAGTCGGTCCTCTGCCATCAAAGCTTCGACCGTGCTCAGTCTC
CATCAGTTGACACCCTGAGGTTTTTTT
PEgRNA-GNRA tetraloop/tetraloop receptor
(SEQ ID NO: 233)
GCAGACCTAAGTGGUGACATATGGTCTGGGCCCAGACTGAGCACGTGAGTT
TTAGAGCTAUACGTAGCAAGTTAAAATAAGGCTAGTCCGTTATCAACTTUA
CGAAGTGGGACCGAGTCGGTCCTCTGCCATCAAAGCTTCGACCGTGCTCAG
TCTGCATGCGATTAGAAATAATCGCATGTTTTTTT
PEgRNA template switching secondary RNA-HDV fusion
(SEQ ID NO: 234)
TCTGCCATCAAAGCTGCGACCGTGCTCAGTCTGGTGGGAGACGTCCCACCG
GCCGGCATGGTCCCAGCCTCCTCGCTGGCGCCGGCTGGGCAACATGCTTCG
GCATGGCGAATGGGACTTTTTTT

[1012] PEgRNA scaffold could be further improved via directed evolution, in an analogous fashion to how SpCas9 and prime editor (PE) have been improved. Directed evolution could enhance PEgRNA recognition by Cas9 or evolved Cas9 variants. Additionally, it is likely that different PEgRNA scaffold sequences would be optimal at different genomic loci, either enhancing PE activity at the site in question, reducing off-target activities, or both. Finally, evolution of PEgRNA scaffolds to which other RNA motifs have been added would almost certainly improve the activity of the fused PEgRNA relative to the unevolved, fusion RNA. For instance, evolution of allosteric ribozymes composed of c-di-GMP-I aptamers and hammerhead ribozymes led to dramatically improved activity²⁰², suggesting that evolution would improve the activity of hammerhead-PEgRNA fusions as well. In addition, while Cas9 currently does not generally tolerate 5′ extension of the sgRNA, directed evolution will likely generate enabling mutations that mitigate this intolerance, allowing additional RNA motifs to be utilized.

[1013] The present disclosure contemplates any such ways to further improve the efficacy of the prime editing systems disclosed here.

[1014] O. Use of Prime Editing with Expanded Targeting Scope

[1015] Prime editing (PE) using Streptococcus pyogenes Cas9 (SpCas9) can efficiently install all single base substitutions, insertions, deletions, and combinations thereof at genomic loci where there is a suitably-placed NGG protospacer adjacent motif (PAM) that SpCas9 can efficiently bind. However, in another aspect the methods described herein broaden the targeting capability of PE by expanding the accessible PAMs and, therefore, the targetable genomic loci accessible for efficient PE. Prime editors using RNA-guided DNA binding proteins other than SpCas9 enable an expanded targettable scope of genomic loci by allowing access to different PAMs. In addition, use of RNA-guided DNA binding proteins smaller than SpCas9 also allows for more efficient viral delivery. PE with Cas proteins or other RNA-guided DNA binding proteins beyond SpCas9 will allow for high efficiency therapeutic edits that were either inaccessible or inefficient using SpCas9-based PE.

[1016] This is expected to be used in situations where SpCas9-based PE is either inefficient due to non-ideal spacing of an edit to relative to an NGG PAM or the overall size of the SpCas9-based construct is prohibitive for cellular expression and/or delivery. Specific disease-relevant loci such as the Huntingtin gene, which has few and poorly located NGG PAMs for SpCas9 near the target region, can easily be targeted using different Cas proteins in the PE system such as SpCas9-VRQR which recognizes an NGA PAM. Smaller Cas proteins will be used to generate smaller PE constructs that can be packaged into AAV vectors more efficiently, enabling better delivery to target tissues. FIG. 61 shows the reduction to practice of prime editing using Staphylococcus aureus CRISPR-Cas as the RNA-guided DNA binding protein. NT is untreated control.

[1017] FIGS. 62A-62B provide a demonstration of the importance of the protospacer for efficient installation of a desired edit at a precise location with prime editing. This highlights the importance of alternate PAMs and protospacers as novel features of this technology. “n.d.” in FIG. 62A is “not detected.”

[1018] FIG. 63 shows the reduction to practice of PE using SpCas9(H840A)-VRQR and SpCas9(H840A)-VRER as the RNA-guided DNA binding protein in a prime editor system. The SpCas9(H840A)-VRQR napDNAbp is disclosed herein as SEQ ID NO: 87. The SpCas9(H840A)-VRER napDNAbp is disclosed herein as SEQ ID NO: 88. The SpCas9(H840A)-VRER-MMLV RT fusion protein is disclosed herein as SEQ ID NO: 516, wherein the MMLV RT comprises the D200N, L603W, T330P, T306K, and W313F substitutions relative to the wild type MMLV RT. The SpCas9(H840A)-VRQR-MMLV RT fusion protein is disclosed herein as SEQ ID NO: 515, wherein the MMLV RT comprises the D200N, L603W, T330P, T306K, and W313F substitutions relative to the wild type MMLV RT. Seven different loci in the human genome are targeted: 4 with the SpCas9(H840A)-VRQR-MMLV RT prime editor system and 3 with the SpCas9(H840A)-VRER-MMLV RT system. The amino acid sequences of the tested constructs are as follows:

| | |
|---|---|
| SACAS9-M-MLV | MKRTADGSEFESPKKKRKVGKRNYILGLDIGITSVGYGIIDYETR |
| RT PRIME EDITOR | DVIDAGVRLFKEANVENNEGRRSKRGARRLKRRRRHRIQRVKK |
| | LLFDYNLLTDHSELSGINPYEARVKGLSQKLSEEEFSAALLHLA |
| | KRRGVHNVNEVEEDTGNELSTKEQISRNSKALEEKYVAELQLE |
| | RLKKDGEVRGSINRFKTSDYVKEAKQLLKVQKAYHQLDQSFID |
| | TYIDLLETRRTYYEGPGEGSPFGWKDIKEWYEMLMGHCTYFPE |
| | ELRSVKYAYNADLYNALNDLNNLVITRDENEKLEYYEKFQIIEN |
| | VFKQKKKPTLKQIAKEILVNEEDIKGYRVTSTGKPEFTNLKVYH |
| | DIKDITARKEIIENAELLDQIAKILTIYQSSEDIQEELTNLNSELTQE |
| | EIEQISNLKGYTGTHNLSLKAINLILDELWHTNDNQIAIFNRLKL |
| | VPKKVDLSQQKEIPTTLVDDFILSPVVKRSFIQSIKVINAIIKKYG |
| | LPNDIIIELAREKNSKDAQKMINEMQKRNRQTNERIEEIIRTTGK |
| | ENAKYLIEKIKLHDMQEGKCLYSLEAIPLEDLLNNPFNYEVDHII |
| | PRSVSFDNSFNNKVLVKQEEASKKGNRTPFQYLSSSDSKISYETF |
| | KKHILNLAKGKGRISKTKKEYLLEERDINRFSVQKDFINRNLVD |
| | TRYATRGLMNLLRSYFRVNNLDVKVKSINGGFTSFLRRKWKFK |
| | KERNKGYKHHAEDALIIANADFIFKEWKKLDKAKKVMENQMF |
| | EEKQAESMPEIETEQEYKEIFITPHQIKHIKDFKDYKYSHRVDKK |
| | PNRELINDTLYSTRKDDKGNTLIVNNLNGLYDKDNDKLKKLIN |
| | KSPEKLLMYHHDPQTYQKLKLIMEQYGDEKNPLYKYYEETGN |
| | YLTKYSKKDNGPVIKKIKYYGNKLNAHLDITDDYPNSRNKVVK |
| | LSLKPYRFDVYLDNGVYKFVTVKNLDVIKKENYYEVNSKCYE |
| | EAKKLKKISNQAEFIASFYNNDLIKINGELYRVIGVNNDLLNRIE |
| | VNMIDITYREYLENMNDKRPPRIIKTIASKTQSIKKYSTDILGNL |
| | YEVKSKKHPQIIKKGSGGSSGGSSGSETPGTSESATPESSGGSSG |
| | GSSTLNIEDEYRLHETSKEPDVSLGSTWLSDFPQAWAETGGMGL |
| | AVRQAPLIIPLKATSTPVSIKQYPMSQEARLGIKPHIQRLLDQGIL |
| | VPCQSPWNTPLLPVKKPGTNDYRPVQDLREVNKRVEDIHPTVP |
| | NPYNLLSGLPPSHQWYTVLDLKDAFFCLRLHPTSQPLFAFEWR |
| | DPEMGISGQLTWTRLPQGFKNSPTLFDEALHRDLADFRIQHPDL |
| | ILLQYVDDLLLAATSELDCQQGTRALLQTLGNLGYRASAKKAQ |
| | ICQKQVKYLGYLLKEGQRWLTEARKETVMGQPTPKTPRQLREF |
| | LGTAGFCRLWIPGFAEMAAPLYPLTKTGTLFNWGPDQQKAYQEI |
| | KQALLTAPALGLPDLTKPFELFVDEKQGYAKGVLTQKLGPWRR |
| | PVAYLSKKLDPVAAGWPPCLRMVAAIAVLTKDAGKLTMGQPLVI |
| | LAPHAVEALVKQPPDRWLSNARMTHYQALLLDTDRVQFGPVV |
| | ALNPATLLPLPEEGLQHNCLDILAEAHGTRPDLTDQPLPDADHT |
| | WYTDGSSLLQEGQRKAGAAVTTETEVIWAKALPAGTSAQRAEL |
| | IALTQALKMAEGKKLNVYTDSRYAFATAHIHGEIYRRRGLLTSE |
| | GKEIKNKDEILALLKALFLPKRLSIIHCPGHQKGHSAEARGNRM |
| | ADQAARKAAITETPDTSTLLIENSSPSGGSKRTADGSEFEPKKKR |
| | KV (SEQ ID NO: 514) |
| SPCAS9(H840A)- | MKRTADGSEFESPKKKRKVDKKYSIGLDIGTNSVGWAVITDEY |
| VRQR-MALONEY | KVPSKKFKVLGNTDRHSIKKNLIGALLFDSGETAEATRLKRTAR |
| MURINE | RRYTRRKNRICYLQEIFSNEMAKVDDSFFHRLEESFLVEEDKKH |
| LEUKEMIA VIRUS | ERHPIFGNIVDEVAYHEKYPTIYHLRKKLVDSTDKADLRLIYLAL |
| REVERSE | AHMIKFRGHFLIEGDLNPDNSDVDKLFIQLVQTYNQLFEENPIN |
| TRANSCRIPTASE | ASGVDAKAILSARLSKSRRLENLIAQLPGEKKNGLFGNLIALSL |
| PRIME EDITOR | GLTPNFKSNFDLAEDAKLQLSKDTYDDDLDNLLAQIGDQYADL |
| | FLAAKNLSDAILLSDILRVNTEITKAPLSASMIKRYDEHHQDLTL |
| | LKALVRQQLPEKYKEIFFDQSKNGYAGYIDGGASQEEFYKFIKPI |
| | LEKMDGTEELLVKLNREDLLRKQRTFDNGSIPHQIHLGELHAIL |
| | RRQEDFYPFLKDNREKIEKILTFRIPYYVGPLARGNSRFAWMTR |
| | KSEETITPWNFEEVVDKGASAQSFIERMTNFDKNLPNEKVLPKH |
| | SLLYEYFTVYNELTKVKYVTEGMRKPAFLSGEQKKAIVDLLFKT |
| | NRKVTVKQLKEDYFKKIECFDSVEISGVEDRFNASLGTYHDLL |
| | KIIKDKDFLDNEENEDILEDIVLTLTLFEDREMIEERLKTYAHLFD |
| | DKVMKQLKRRRYTGWGRLSRKLINGIRDKQSGKTILDFLKSDG |
| | FANRNFMQLIHDDSLTFKEDIQKAQVSGQGDSLHEHIANLAGSP |
| | AIKKGILQTVKVVDELVKVMGRHKPENIVIEMARENQTTQKGQ |
| | KNSRERMKRIEEGIKELGSQILKEHPVENTQLQNEKLYLYYLQN |
| | GRDMYVDQELDINRLSDYDVDAIVPQSFLKDDSIDNKVLTRSD |
| | KNRGKSDNVPSEEVVKKMKNYWRQLLNAKLITQRKFDNLTKA |
| | ERGGLSELDKAGFIKRQLVETRQITKHVAQILDSRMNTKYDEND |
| | KLIREVKVITLKSKLVSDFRKDFQFYKVREINNYHHAHDAYLNA |
| | VVGTALIKKYPKLESEFVYGDYKVYDVRKMIAKSEQEIGKATA |
| | KYFFYSNIMNFFKTEITLANGEIRKRPLIETNGETGEIVWDKGRD |
| | FATVRKVLSMPQVNIVKKTEVQTGGFSKESILPKRNSDKLIARK |
| | KDWDPKKYGGFVSPTVAYSVLVVAKVEKGKSKKLKSVKELLGI |
| | TIMERSSFEKNPIDFLEAKGYKEVKKDLIIKLPKYSLFELENGRK |
| | RMLASARELQKGNELALPSKYVNFLYLASHYEKLKGSPEDNEQ |
| | KQLFVEQHKHYLDEIIEQISEFSKRVILADANLDKVLSAYNKHR |
| | DKPIREQAENIIHLFTLTNLGAPAAFKYFDTTIDRKQYRSTKEVL |
| | DATLIHQSITGLYETRIDLSQLGGDSGGSSGGSSGSETPGTSESAT |
| | PESSGGSSGGSSTLNIEDEYRLHETSKEPDVSLGSTWLSDFPQA |
| | WAETGGMGLAVRQAPLIIPLKATSTPVSIKQYPMSQEARLGIKP |
| | HIQRLLDQGILVPCQSPWNTPLLPVKKPGTNDYRPVQDLREVN |
| | KRVEDIHPTVPNPYNLLSGLPPSHQWYTVLDLKDAFFCLRLHPT |
| | SQPLFAFEWRDPEMGISGQLTWTRLPQGFKNSPTLFNEALHRDL |
| | ADFRIQHPDLILLQYVDDLLLAATSELDCQQGTRALLQTLGNLG |
| | YRASAKKAQICQKQVKYLGYLLKEGQRWLTEARKETVMGQPT |
| | PKTPRQLREFLGKAGFCRLFIPGFAEMAAPLYPLTKPGTLFNWG |
| | PDQQKAYQEIKQALLTAPALGLPDLTKPFELFVDEKQGYAKGVL |
| | TQKLGPWRRPVAYLSKKLDPVAAGWPPCLRMVAAIAVLTKDAG |
| | KLTMGQPLVILAPHAVEALVKQPPDRWLSNARMTHYQALLLDT |
| | DRVQFGPVVALNPATLLPLPEEGLQHNCLDILAEAHGTRPDLTD |
| | QPLPDADHTWYTDGSSLLQEGQRKAGAAVTTETEVIWAKALPA |
| | GTSAQRAELIALTQALKMAEGKKLNVYTDSRYAFATAHIHGEIY |
| | RRRGWLTSEGKEIKNKDEILALLKALFLPKRLSIIHCPGHQKGHS |
| | AEARGNRMADQAARKAAITETPDTSTLLIENSSPSGGSKRTADG |
| | SEFEPKKKRKV (SEQ ID NO: 515) |
| SPCAS9(H840A)- | MKRTADGSEFESPKKKRKVDKKYSIGLDIGTNSVGWAVITDEY |
| VRER-MALONEY | KVPSKKFKVLGNTDRHSIKKNLIGALLFDSGETAEATRLKRTAR |
| MURINE | RRYTRRKNRICYLQEIFSNEMAKVDDSFFHRLEESFLVEEDKKH |
| LEUKEMIA VIRUS | ERHPIFGNIVDEVAYHEKYPTIYHLRKKLVDSTDKADLRLIYLAL |
| REVERSE | AHMIKFRGHFLIEGDLNPDNSDVDKLFIQLVQTYNQLFEENPIN |
| TRANSCRIPTASE | ASGVDAKAILSARLSKSRRLENLIAQLPGEKKNGLFGNLIALSL |
| PRIME EDITOR | GLTPNFKSNFDLAEDAKLQLSKDTYDDDLDNLLAQIGDQYADL |
| | FLAAKNLSDAILLSDILRVNTEITKAPLSASMIKRYDEHHQDLTL |
| | LKALVRQQLPEKYKEIFFDQSKNGYAGYIDGGASQEEFYKFIKPI |
| | LEKMDGTEELLVKLNREDLLRKQRTFDNGSIPHQIHLGELHAIL |
| | RRQEDFYPFLKDNREKIEKILTFRIPYYVGPLARGNSRFAWMTR |
| | KSEETITPWNFEEVVDKGASAQSFIERMTNFDKNLPNEKVLPKH |
| | SLLYEYFTVYNELTKVKYVTEGMRKPAFLSGEQKKAIVDLLFKT |
| | NRKVTVKQLKEDYFKKIECFDSVEISGVEDRFNASLGTYHDLL |
| | KIIKDKDFLDNEENEDILEDIVLTLTLFEDREMIEERLKTYAHLFD |
| | DKVMKQLKRRRYTGWGRLSRKLINGIRDKQSGKTILDFLKSDG |
| | FANRNFMQLIHDDSLTFKEDIQKAQVSGQGDSLHEHIANLAGSP |
| | AIKKGILQTVKVVDELVKVMGRHKPENIVIEMARENQTTQKGQ |
| | KNSRERMKRIEEGIKELGSQILKEHPVENTQLQNEKLYLYYLQN |
| | GRDMYVDQELDINRLSDYDVDAIVPQSFLKDDSIDNKVLTRSD |
| | KNRGKSDNVPSEEVVKKMKNYWRQLLNAKLITQRKFDNLTKA |
| | ERGGLSELDKAGFIKRQLVETRQITKHVAQILDSRMNTKYDEND |
| | KLIREVKVITLKSKLVSDFRKDFQFYKVREINNYHHAHDAYLNA |
| | VVGTALIKKYPKLESEFVYGDYKVYDVRKMIAKSEQEIGKATA |
| | KYFFYSNIMNFFKTEITLANGEIRKRPLIETNGETGEIVWDKGRD |
| | FATVRKVLSMPQVNIVKKTEVQTGGFSKESILPKRNSDKLIARK |
| | KDWDPKKYGGFVSPTVAYSVLVVAKVEKGKSKKLKSVKELLGI |
| | TIMERSSFEKNPIDFLEAKGYKEVKKDLIIKLPKYSLFELENGRK |
| | RMLASARELQKGNELALPSKYVNFLYLASHYEKLKGSPEDNEQ |
| | KQLFVEQHKHYLDEIIEQISEFSKRVILADANLDKVLSAYNKHR |
| | DKPIREQAENIIHLFTLTNLGAPAAFKYFDTTIDRKEYRSTKEVL |
| | DATLIHQSITGLYETRIDLSQLGGDSGGSSGGSSGSETPGTSESAT |
| | PESSGGSSGGSSTLNIEDEYRLHETSKEPDVSLGSTWLSDFPQA |
| | WAETGGMGLAVRQAPLIIPLKATSTPVSIKQYPMSQEARLGIKP |
| | HIQRLLDQGILVPCQSPWNTPLLPVKKPGTNDYRPVQDLREVN |
| | KRVEDIHPTVPNPYNLLSGLPPSHQWYTVLDLKDAFFCLRLHPT |
| | SQPLFAFEWRDPEMGISGQLTWTRLPQGFKNSPTLFNEALHRDL |
| | ADFRIQHPDLILLQYVDDLLLAATSELDCQQGTRALLQTLGNLG |
| | YRASAKKAQICQKQVKYLGYLLKEGQRWLTEARKETVMGQPT |
| | PKTPRQLREFLGKAGFCRLFIPGFAEMAAPLYPLTKPGTLFNWG |
| | PDQQKAYQEIKQALLTAPALGLPDLTKPFELFVDEKQGYAKGVL |
| | TQKLGPWRRPVAYLSKKLDPVAAGWPPCLRMVAAIAVLTKDAG |
| | KLTMGQPLVILAPHAVEALVKQPPDRWLSNARMTHYQALLLDT |
| | DRVQFGPVVALNPATLLPLPEEGLQHNCLDILAEAHGTRPDLTD |
| | QPLPDADHTWYTDGSSLLQEGQRKAGAAVTTETEVIWAKALPA |
| | GTSAQRAELIALTQALKMAEGKKLNVYTDSRYAFATAHIHGEIY |
| | RRRGWLTSEGKEIKNKDEILALLKALFLPKRLSIIHCPGHQKGHS |
| | AEARGNRMADQAARKAAITETPDTSTLLIENSSPSGGSKRTADG |
| | SEFEPKKKRKV (SEQ ID NO: 516) |

[1019] As shown in FIG. 63, the SpCas9(H840A)-VRQR-MMLV RT was operational at PAM sites that included “AGAG” and “GGAG”, with some editing activity at “GGAT” and “AGAT” PAM sequences. The SpCas9(H840A)-VRER-MMLV RT was operational at PAM sites that included “AGCG” and “GGCG”, with some editing activity at “TGCG.”

[1020] The data demonstrates that prime editing may be conducted using napDNAbps which bear different PAM specificities, such as those Cas9 variant described herein.

[1021] In various embodiments, the napDNAbp (e.g., Cas9) with altered PAM specificities comprise a combination of mutations that exhibit activity on a target sequence comprising a 5′-NAA-3′ PAM sequence at its 3′-end. In some embodiments, the combination of mutations are present in any one of the clones listed in Table 1. In some embodiments, the combination of mutations are conservative mutations of the clones listed in Table 1. In some embodiments, the Cas9 protein comprises the combination of mutations of any one of the Cas9 clones listed in Table 1.

TABLE 1
NAA PAM Clones
Mutations from wild-type SpCas9 (e.g., SEQ ID NO: 18)

D177N, K218R, D614N, D1135N, P1137S, E1219V, A1320V,
A1323D, R1333K
D177N, K218R, D614N, D1135N, E1219V, Q1221H, H1264Y,
A1320V, R1333K
A10T, I322V, S409I, E427G, G715C, D1135N, E1219V, Q1221H,
H1264Y, A1320V, R1333K
A367T, K710E, R1114G, D1135N, P1137S, E1219V, Q1221H,
H1264Y, A1320V, R1333K
A10T, I322V, S409I, E427G, R753G, D861N, D1135N, K1188R,
E1219V, Q1221H, H1264H, A1320V, R1333K
A10T, I322V, S409I, E427G, R654L, V743I, R753G, M1021T,
D1135N, D1180G, K1211R, E1219V, Q1221H, H1264Y, A1320V,
R1333K
A10T, I322V, S409I, E427G, V743I, R753G, E762G, D1135N,
D1180G, K1211R, E1219V, Q1221H, H1264Y, A1320V, R1333K
A10T, I322V, S409I, E427G, R753G, D1135N, D1180G, K1211R,
E1219V, Q1221H, H1264Y, S1274R, A1320V, R1333K
A10T, I322V, S409I, E427G, A589S, R753G, D1135N, E1219V,
Q1221H, H1264H, A1320V, R1333K
A10T, I322V, S409I, E427G, R753G, E757K, G865G, D1135N,
E1219V, Q1221H, H1264Y, A1320V, R1333K
A10T, I322V, S409I, E427G, R654L, R753G, E757K, D1135N,
E1219V, Q1221H, H1264Y, A1320V, R1333K
A10T, I322V, S409I, E427G, K599R, M631A, R654L, K673E,
V743I, R753G, N758H, E762G, D1135N, D1180G, E1219V,
Q1221H, Q1256R, H1264Y, A1320V, A1323D, R1333K
A10T, I322V, S409I, E427G, R654L, K673E, V743I, R753G,
E762G, N869S, N1054D, R1114G, D1135N, D1180G, E1219V,
Q1221H, H1264Y, A1320V, A1323D, R1333K
A10T, I322V, S409I, E427G, R654L, L727I, V743I, R753G,
E762G, R859S, N946D, F1134L, D1135N, D1180G, E1219V,
Q1221H, H1264Y, N1317T, A1320V, A1323D, R1333K
A10T, I322V, S409I, E427G, R654L, K673E, V743I, R753G,
E762G, N803S, N869S, Y1016D, G1077D, R1114G, F1134L,
D1135N, D1180G, E1219V, Q1221H, H1264Y, V1290G,
L1318S, A1320V, A1323D, R1333K
A10T, I322V, S409I, E427G, R654L, K673E, V743I, R753G,
E762G, N803S, N869S, Y1016D, G1077D, R1114G, F1134L,
D1135N, K1151E, D1180G, E1219V, Q1221H, H1264Y,
V1290G, L1318S, A1320V, R1333K
A10T, I322V, S409I, E427G, R654L, K673E, V743I, R753G,
E762G, N803S, N869S, Y1016D, G1077D, R1114G, F1134L,
D1135N, D1180G, E1219V, Q1221H, H1264Y, V1290G,
L1318S, A1320V, A1323D, R1333K
A10T, I322V, S409I, E427G, R654L, K673E, F693L, V743I,
R753G, E762G, N803S, N869S, L921P, Y1016D, G1077D,
F1080S, R1114G, D1135N, D1180G, E1219V, Q1221H,
H1264Y, L1318S, A1320V, A1323D, R1333K
A10T, I322V, S409I, E427G, E630K, R654L, K673E, V743I,
R753G, E762G, Q768H, N803S, N869S, Y1016D, G1077D,
R1114G, F1134L, D1135N, D1180G, E1219V, Q1221H,
H1264Y, L1318S, A1320V, R1333K
A10T, I322V, S409I, E427G, R654L, K673E, F693L, V743I, R753G,
E762G, Q768H, N803S, N869S, Y1016D, G1077D, R1114G, F1134L,
D1135N, D1180G, E1219V, Q1221H, G1223S, H1264Y, L1318S,
A1320V, R1333K
A10T, I322V, S409I, E427G, R654L, K673E, F693L, V743I, R753G,
E762G, N803S, N869S, L921P, Y1016D, G1077D, F1801S, R1114G,
D1135N, D1180G, E1219V, Q1221H, H1264Y, L1318S, A1320V,
A1323D, R1333K
A10T, I322V, S409I, E427G, R654L, V743I, R753G, M1021T,
D1135N, D1180G, K1211R, E1219V, Q1221H, H1264Y, A1320V,
R1333K
A10T, I322V, S409I, E427G, R654L, K673E, V743I, R753G,
E762G, M673I, N803S, N869S, G1077D, R1114G, D1135N, V1139A,
D1180G, E1219V, Q1221H, A1320V, R1333K
A10T, I322V, S409I, E427G, R654L, K673E, V743I, R753G, E762G,
N803S, N869S, R1114G, D1135N, E1219V, Q1221H, A1320V,
R1333K

[1022] In some embodiments, the Cas9 protein comprises an amino acid sequence that is at least 80% identical to the amino acid sequence of a Cas9 protein as provided by any one of the variants of Table 1. In some embodiments, the Cas9 protein comprises an amino acid sequence that is at least 85%, at least 90%, at least 92%, at least 95%, at least 96%, at least 97%, at least 98%, at least 99%, or at least 99.5% identical to the amino acid sequence of a Cas9 protein as provided by any one of the variants of Table 1.

[1023] In some embodiments, the Cas9 protein exhibits an increased activity on a target sequence that does not comprise the canonical PAM (5′-NGG-3′) at its 3′ end as compared to Streptococcus pyogenes Cas9 as provided by SEQ ID NO: 18. In some embodiments, the Cas9 protein exhibits an activity on a target sequence having a 3′ end that is not directly adjacent to the canonical PAM sequence (5′-NGG-3′) that is at least 5-fold increased as compared to the activity of Streptococcus pyogenes Cas9 as provided by SEQ ID NO: 18 on the same target sequence. In some embodiments, the Cas9 protein exhibits an activity on a target sequence that is not directly adjacent to the canonical PAM sequence (5′-NGG-3′) that is at least 10-fold, at least 50-fold, at least 100-fold, at least 500-fold, at least 1,000-fold, at least 5,000-fold, at least 10,000-fold, at least 50,000-fold, at least 100,000-fold, at least 500,000-fold, or at least 1,000,000-fold increased as compared to the activity of Streptococcus pyogenes as provided by SEQ ID NO: 18 on the same target sequence. In some embodiments, the 3′ end of the target sequence is directly adjacent to an AAA, GAA, CAA, or TAA sequence. In some embodiments, the Cas9 protein comprises a combination of mutations that exhibit activity on a target sequence comprising a 5′-NAC-3′ PAM sequence at its 3′-end. In some embodiments, the combination of mutations are present in any one of the clones listed in Table 2. In some embodiments, the combination of mutations are conservative mutations of the clones listed in Table 2. In some embodiments, the Cas9 protein comprises the combination of mutations of any one of the Cas9 clones listed in Table 2.

TABLE 2
NAC PAM Clones
MUTATIONS FROM WILD-TYPE SPCAS9 (E.G., SEQ ID NO: 18)

T472I, R753G, K890E, D1332N, R1335Q, T1337N
I1057S, D1135N, P1301S, R1335Q, T1337N
T472I, R753G, D1332N, R1335Q, T1337N
D1135N, E1219V, D1332N, R1335Q, T1337N
T472I, R753G, K890E, D1332N, R1335Q, T1337N
I1057S, D1135N, P1301S, R1335Q, T1337N
T472I, R753G, D1332N, R1335Q, T1337N
T472I, R753G, Q771H, D1332N, R1335Q, T1337N
E627K, T638P, K652T, R753G, N803S, K959N, R1114G, D1135N,
E1219V, D1332N, R1335Q, T1337N
E627K, T638P, K652T, R753G, N803S, K959N, R1114G, D1135N,
K1156E, E1219V, D1332N, R1335Q, T1337N
E627K, T638P, V647I, R753G, N803S, K959N, G1030R, I1055E,
R1114G, D1135N, E1219V, D1332N, R1335Q, T1337N
E627K, E630G, T638P, V647A, G687R, N767D, N803S, K959N,
R1114G, D1135N, E1219V, D1332G, R1335Q, T1337N
E627K, T638P, R753G, N803S, K959N, R1114G, D1135N, E1219V,
N1266H, D1332N, R1335Q, T1337N
E627K, T638P, R753G, N803S, K959N, I1057T, R1114G, D1135N,
E1219V, D1332N, R1335Q, T1337N
E627K, T638P, R753G, N803S, K959N, R1114G, D1135N, E1219V,
D1332N, R1335Q, T1337N
E627K, M631I, T638P, R753G, N803S, K959N, Y1036H, R1114G,
D1135N, E1219V, D1251G, D1332G, R1335Q, T1337N
E627K, T638P, R753G, N803S, V875I, K959N, Y1016C, R1114G,
D1135N, E1219V, D1251G, D1332G, R1335Q, T1337N, I1348V
K608R, E627K, T638P, V647I, R654L, R753G, N803S, T804A,
K848N, V922A, K959N, R1114G, D1135N, E1219V, D1332N,
R1335Q, T1337N
K608R, E627K, T638P, V647I, R753G, N803S, V922A, K959N,
K1014N, V1015A, R1114G, D1135N, K1156N, E1219V, N1252D,
D1332N, R1335Q, T1337N
K608R, E627K, R629G, T638P, V647I, A711T, R753G, K775R,
K789E, N803S, K959N, V1015A, Y1036H, R1114G, D1135N,
E1219V, N1286H, D1332N, R1335Q, T1337N
K608R, E627K, T638P, V647I, T740A, R753G, N803S, K948E,
K959N, Y1016S, R1114G, D1135N, E1219V, N1286H, D1332N,
R1335Q, T1337N
K608R, E627K, T638P, V647I, T740A, N803S, K948E, K959N,
Y1016S, R1114G, D1135N, E1219V, N1286H, D1332N, R1335Q,
T1337N
I670S, K608R, E627K, E630G, T638P, V647I, R653K, R753G,
I795L, K797N, N803S, K866R, K890N, K959N, Y1016C, R1114G,
D1135N, E1219V, D1332N, R1335Q, T1337N
K608R, E627K, T638P, V647I, T740A, G752R, R753G, K797N,
N803S, K948E, K959N, V1015A, Y1016S, R1114G, D1135N,
E1219V, N1266H, D1332N, R1335Q, T1337N
I570T, A589V, K608R, E627K, T638P, V647I, R654L, Q716R,
R753G, N803S, K948E, K959N, Y1016S, R1114G, D1135N, E1207G,
E1219V, N1234D, D1332N, R1335Q, T1337N
K608R, E627K, R629G, T638P, V647I, R654L, Q740R, R753G,
N803S, K959N, N990S, T995S, V1015A, Y1036D, R1114G,
D1135N, E1207G, E1219V, N1234D, N1266H, D1332N, R1335Q,
T1337N
I562F, V565D, I570T, K608R, L625S, E627K, T638P, V647I,
R654I, G752R, R753G, N803S, N808D, K959N, M1021L, R1114G,
D1135N, N1177S, N1234D, D1332N, R1335Q, T1337N
I562F, I570T, K608R, E627K, T638P, V647I, R753G, E790A,
N803S, K959N, V1015A, Y1036H, R1114G, D1135N, D1180E,
A1184T, E1219V, D1332N, R1335Q, T1337N
I570T, K608R, E627K, T638P, V647I, R654H, R753G,
E790A, N803S, K959N, V1015A, R1114G, D1127A, D1135N,
E1219V, D1332N, R1335Q, T1337N
I570T, K608R, L625S, E627K, T638P, V647I, R654I, T703P,
R753G, N803S, N808D, K959N, M1021L, R1114G, D1135N,
E1219V, D1332N, R1335Q, T1337N
I570S, K608R, E627K, E630G, T638P, V647I, R653K, R753G,
I795L, N803S, K866R, K890N, K959N, Y1016C, R1114G, D1135N,
E1219V, D1332N, R1335Q, T1337N
I570T, K608R, E627K, T638P, V647I, R654H, R753G, E790A,
N803S, K959N, V1016A, R1114G, D1135N, E1219V, K1246E,
D1332N, R1335Q, T1337N
K608R, E627K, T638P, V647I, R654L, K673E, R753G, E790A,
N803S, K948E, K959N, R1114G, D1127G, D1135N, D1180E,
E1219V, N1286H, D1332N, R1335Q, T1337N
K608R, L625S, E627K, T638P, V647I, R654I, I670T, R753G, N803S,
N808D, K959N, M1021L, R1114G, D1135N, E1219V, N1286H,
D1332N, R1335Q, T1337N
E627K, M631V, T638P, V647I, K710E, R753G, N803S, N808D,
K948E, M1021L, R1114G, D1135N, E1219V, D1332N, R1335Q,
T1337N, S1338T, H1349R

[1024] In some embodiments, the Cas9 protein comprises an amino acid sequence that is at least 80% identical to the amino acid sequence of a Cas9 protein as provided by any one of the variants of Table 2. In some embodiments, the Cas9 protein comprises an amino acid sequence that is at least 85%, at least 90%, at least 92%, at least 95%, at least 96%, at least 97%, at least 98%, at least 99%, or at least 99.5% identical to the amino acid sequence of a Cas9 protein as provided by any one of the variants of Table 2.

[1025] In some embodiments, the Cas9 protein exhibits an increased activity on a target sequence that does not comprise the canonical PAM (5′-NGG-3′) at its 3′ end as compared to Streptococcus pyogenes Cas9 as provided by SEQ ID NO: 18. In some embodiments, the Cas9 protein exhibits an activity on a target sequence having a 3′ end that is not directly adjacent to the canonical PAM sequence (5′-NGG-3′) that is at least 5-fold increased as compared to the activity of Streptococcus pyogenes Cas9 as provided by SEQ ID NO: 18 on the same target sequence. In some embodiments, the Cas9 protein exhibits an activity on a target sequence that is not directly adjacent to the canonical PAM sequence (5′-NGG-3′) that is at least 10-fold, at least 50-fold, at least 100-fold, at least 500-fold, at least 1,000-fold, at least 5,000-fold, at least 10,000-fold, at least 50,000-fold, at least 100,000-fold, at least 500,000-fold, or at least 1,000,000-fold increased as compared to the activity of Streptococcus pyogenes as provided by SEQ ID NO: 18 on the same target sequence. In some embodiments, the 3′ end of the target sequence is directly adjacent to an AAC, GAC, CAC, or TAC sequence.

[1026] In some embodiments, the Cas9 protein comprises a combination of mutations that exhibit activity on a target sequence comprising a 5′-NAT-3′ PAM sequence at its 3′-end. In some embodiments, the combination of mutations are present in any one of the clones listed in Table 3. In some embodiments, the combination of mutations are conservative mutations of the clones listed in Table 3. In some embodiments, the Cas9 protein comprises the combination of mutations of any one of the Cas9 clones listed in Table 3.

TABLE 3
NAT PAM Clones
MUTATIONS FROM WILD-TYPE SPCAS9 (E.G., SEQ ID NO: 18)

K961E, H985Y, D1135N, K1191N, E1219V, Q1221H, A1320A,
P1321S, R1335L
D1135N, G1218S, E1219V, Q1221H, P1249S, P1321S, D1322G,
R1335L
V743I, R753G, E790A, D1135N, G1218S, E1219V, Q1221H,
A1227V, P1249S, N1286K, A1293T, P1321S, D1322G, R1335L,
T1339I
F575S, M631L, R654L, V748I, V743I, R753G, D853E, V922A,
R1114G D1135N, G1218S, E1219V, Q1221H, A1227V, P1249S,
N1286K, A1293T, P1321S, D1322G, R1335L, T1339I
F575S, M631L, R654L, R664K, R753G, D853E, V922A, R1114G
D1135N, D1180G, G1218S, E1219V, Q1221H, P1249S, N1286K,
P1321S, D1322G, R1335L
M631L, R654L, R753G, K797E, D853E, V922A, D1012A, R1114G
D1135N, G1218S, E1219V, Q1221H, P1249S, N1317K, P1321S,
D1322G, R1335L
F575S, M631L, R654L, R664K, R753G, D853E, V922A, R1114G,
Y1131C, D1135N, D1180G, G1218S, E1219V, Q1221H, P1249S,
P1321S, D1322G, R1335L
F575S, M631L, R654L, R664K, R753G, D853E, V922A, R1114G,
Y1131C, D1135N, D1180G, G1218S, E1219V, Q1221H, P1249S,
P1321S, D1322G, R1335L
F575S, D596Y, M631L, R654L, R664K, R753G, D853E, V922A,
R1114G, Y1131C, D1135N, D1180G, G1218S, E1219V,
Q1221H, P1249S, Q1256R, P1321S, D1322G, R1335L
F575S, M631L, R654L, R664K, K710E, V750A, R753G, D853E,
V922A, R1114G, Y1131C, D1135N, D1180G, G1218S, E1219V,
Q1221H, P1249S, P1321S, D1322G, R1335L
F575S, M631L, K649R, R654L, R664K, R753G, D853E, V922A,
R1114G, Y1131C, D1135N, K1156E, D1180G, G1218S, E1219V,
Q1221H, P1249S, P1321S, D1322G, R1335L
F575S, M631L, R654L, R664K, R753G, D853E, V922A, R1114G,
Y1131C, D1135N, D1180G, G1218S, E1219V, Q1221H, P1249S,
P1321S, D1322G, R1335L
F575S, M631L, R654L, R664K, R753G, D853E, V922A, I1057G,
R1114G, Y1131C, D1135N, D1180G, G1218S, E1219V, Q1221H,
P1249S, N1308D, P1321S, D1322G, R1335L
M631L, R654L, R753G, D853E, V922A, R1114G, Y1131C, D1135N,
E1150V, D1180G, G1218S, E1219V, Q1221H, P1249S, P1321S,
D1332G, R1335L
M631L, R654L, R664K, R753G, D853E, I1057V, Y1131C,
D1135N, D1180G, G1218S, E1219V, Q1221H, P1249S, P1321S,
D1332G, R1335L
M631L, R654L, R664K, R753G, I1057V, R1114G, Y1131C,
D1135N, D1180G, G1218S, E1219V, Q1221H, P1249S, P1321S,
D1332G, R1335L

[1027] Any of the above Cas9 variants displaying differential PAM specificities as compared to the canonical SpCas9 may be used in the herein disclosed prime editors.

[1028] P. Use of Prime Editing for Inserting Recombinase Target Sites

[1029] In another aspect, prime editing may be used to insert recombinase sites (or “recombinase recognition sequences”) into a desired genomic site. Insertion of recombinase sites provides a programmed location for effecting site-specific genetic changes in a genome. Such genetic changes can include, for example, genomic integration of a plasmid, genomic deletion or insertion, chromosomal translocations, and cassette exchanges, among other genetic changes. These exemplary types of genetic changes are illustrated in FIGS. 64B-64F. The installed recombinase recognition sequences may then be used to conduct site-specific recombination at that site to effectuate a variety of recombination outcomes, such as, excision, integration, inversion, or exchange of DNA fragments. For example, FIG. 65 illustrates the installation of a recombinase site that can then be used to integrate a DNA donor template comprising a GFP expression marker. Cells containing the integrated GFP expression system into the recombinase site will fluoresce.

[1030] The mechanism of installing a recombinase site into the genome is analogous to installing other sequences, such as peptide/protein and RNA tags, into the genome. A schematic exemplifying the installation of a recombinase target sequence is shows in FIG. 64(a). The process begins with selecting a desired target locus into which the recombinase target sequence will be introduced. Next, a prime editor fusion is provided (“RT-Cas9:gRNA”). Here, the “gRNA” refers to a PEgRNA, which can be designed using the principles described herein. The PEgRNA in various embodiments will comprise an architecture corresponding to FIG. 3D (5′-[˜20-nt spacer]-[gRNA core]-[extension arm]-3′, wherein the extension arm comprises in the 3′ to 5′ direction, a primer binding site (“A”), an edit template (“B”), and a homology arm (“C”). The edit template (“B”) will comprise a sequence corresponding to a recombinase site, i.e., a single strand RNA of the PEgRNA that codes for a complementary single strand DNA that is either the sense or the antisense strand of the recombinase site and which is incorporated into the genomic DNA target locus through the prime editing process.

[1031] In various aspects, the present disclosure provides for the use of a PE to introduce recombinase recognition sequences at high-value loci in human or other genomes, which, after exposure to site-specific recombinase(s), will direct precise and efficient genomic modifications (FIG. 64). In various embodiments show in FIG. 64, PE may be used to (b) insert a single SSR target for use as a site for genomic integration of a DNA donor template. (c) shows how a tandem insertion of SSR target sites can be used to delete a portion of the genome. (d) shows how a tandem insertion of SSR target sites can be used to invert a portion of the genome. (e) shows how the insertion of two SSR target sites at two distal chromosomal regions can result in chromosomal translocation. (f) shows how the insertion of two different SSR target sites in the genome can be used to exchange a cassette from a DNA donor template. Each of the types of genome modifications are envisioned by using PE to insert SSR targets, but this list also is not meant to be limiting.

[1032] PE-mediated introduction of recombinase recognition sequences could be particularly useful for the treatment of genetic diseases which are caused by large-scale genomic defects, such as gene loss, inversion, or duplication, or chromosomal translocation¹⁻⁷ (Table 6). For example, Williams-Beuren syndrome is a developmental disorder caused by a deletion of 24 in chromosome 721. No technology exists currently for the efficient and targeted insertion of multiple entire genes in living cells (the potential of PE to do such a full-length gene insertion is currently being explored but has not yet been established); however, recombinase-mediated integration at a target inserted by PE offers one approach towards a permanent cure for this and other diseases. In addition, targeted introduction of recombinase recognition sequences could be highly enabling for applications including generation of transgenic plants, animal research models, bioproduction cell lines, or other custom eukaryotic cell lines. For example, recombinase-mediated genomic rearrangement in transgenic plants at PE-specific targets could overcome one of the bottlenecks to generating agricultural crops with improved properties⁸⁻⁹.

TABLE 6
Examples of genetic diseases linked to large-scale genomic
modifications that could be repaired through PE-based
installation of recombinase recognition sequences.

| DISEASE | CAUSE |
|---|---|
| TRISOMY 17P | GENE DUPLICATION |
| CHARCOT-MARIE- | GENE DUPLICATION |
| TOOTH DISEASE TYPE I | |
| SMITH-MAGENIS | GENE DELETION |
| SYNDROME | |
| WILLIAMS-BEUREN | GENE DELETION |
| SYNDROME | |
| DE LA CHAPELLE | CHROMOSOMAL |
| SYNDROME | TRANSLOCATION |
| DOWN SYNDROME | CHROMOSOMAL |
| (SOME FORMS) | TRANSLOCATION |
| HEMOPHILIA A | GENE INVERSION |
| HUNTER SYNDROME | GENE INVERSION |

[1033] A number of SSR family members have been characterized and their recombinase recognition sequences described, including natural and engineered tyrosine recombinases (Table 7), large serine integrases (Table 8), serine resolvases (Table 9), and tyrosine integrases (Table 10). Modified target sequences that demonstrate enhanced rates of genomic integration have also been described for several SSRs²²⁻³⁰. In addition to natural recombinases, programmable recombinases with distinct specificities have been developed³¹⁻⁴⁰. Using PE, one or more of these recognition sequences could be introduced into the genomic at a specified location, such as a safe harbor locus⁴¹⁻⁴³, depending on the desired application.

[1034] For example, introduction of a single recombinase recognition sequence in the genome by prime editing would result in integrative recombination with a DNA donor template (FIG. 64b). Serine integrases, which operate robustly in human cells, may be especially well-suited for gene integration⁴⁴⁻⁴⁵.

[1035] Additionally, introduction of two recombinase recognition sequences could result in deletion of the intervening sequence, inversion of the intervening sequence, chromosomal translocation, or cassette exchange, depending on the identity and orientation of the targets (FIGS. 64C-64F). By choosing endogenous sequences that already closely resemble recombinase targets, the scope of editing required to introduce the complete recombinase target would be reduced.

[1036] Finally, several recombinases have been demonstrated to integrate into human or eukaryotic genomes at natively occurring pseudosites⁴⁶⁻⁶⁴. PE editing could be used to modify these loci to enhance rates of integration at these natural pseudosites, or alternatively, to eliminate pseudosites that may serve as unwanted off-target sequences.

[1037] This disclosure describes a general methodology for introducing recombinase target sequences in eukaryotic genomes using PE, the applications of which are nearly limitless. The genome editing reactions are intended for use with “prime editor,” a chimeric fusion of a CRISPR/Cas9 protein and a reverse-transcriptase domain, which utilizes a custom prime editing guide RNA (PEgRNA). By extension, Cas9 tools and homology-directed repair (HDR) pathways may also be exploited to introduce recombinase recognition sequences through DNA templates by lowering the rates of indels using several techniques⁶⁵⁻⁶⁷. A proof-of-concept experiment in human cell culture is shown in FIG. 65.

[1038] The following several tables are cited in the above description relating to PE-directed installation of recombinase recognition sequences and provide a listing of exemplary recombinases that may be used, and their cognate recombinase recognition sequences that may be installed by PE.

TABLE 7
Tyrosine recombinases and SSR target sequences.

| Recombinase | Recombinase recognition sequence | Name |
|---|---|---|
| Cre | ATAACTTCGTATAGCATACATTATACGAAGTTAT | loxP |
| | (SEQ ID NO: 517) | |
| Dre | TAACTTTAAATAATGCCAATTATTTAAAGTTA (SEQ | rox |
| | ID NO: 518) | |
| VCre | TCAATTTCTGAGAACTGTCATTCTCGGAAATTGA | loxV |
| | (SEQ ID NO: 519) | |
| SCre | CTCGTGTCCGATAACTGTAATTATCGGACATGAT | loxS |
| | (SEQ ID NO: 520) | |
| Flp | GAAGTTCCTATTCTCTAGAAAGTATAGGAACTTC | FRT |
| | (SEQ ID NO: 521) | |
| B2 | GAGTTTCATTAAGGAATAACTAATTCCCTAATGAA | loxB |
| | ACTC (SEQ ID NO: 522) | |
| B3 | GGTTGCTTAAGAATAAGTAATTCTTAAGCAACC | loxB3 |
| | (SEQ ID NO: 523) | |
| Kw | ACGAAAAATGGTAAGGAATAGACCATTCCTTACC | |
| | ATTTTTGGT (SEQ ID NO: 524) | |
| R | TTGATGAAAGAATAACGTATTCTTTCATCAA (SEQ | RS |
| | ID NO: 525) | |
| TD1-40 | GTGCGTCAAATAATAACGTATTATTTGACACTT | TDRS |
| | (SEQ ID NO: 526) | |
| Vika | AATAGGTCTGAGAACGCCCATTCTCAGACGTATT | vox |
| | (SEQ ID NO: 527) | |
| Nigri | TGAATGTCCTATAATTACACTTATAGGACATTCA | nox |
| | (SEQ ID NO: 528) | |
| Panto | GAAACTTTAAATAATAAGTCTTATTTAAAGTTTC | pox |
| | (SEQ ID NO: 529) | |
| Kd | AAACGATATCAGACATTTGTCTGATAATGCTTCA | loxK |
| | TTATCAGACAAATGTCTGATATCGTTT (SEQ ID | |
| | NO: 530) | |
| Fre | ATATATACGTATATAGACATATATACGTATATAT | loxH |
| | (SEQ ID NO: 531) | |
| CreALSHG | ATAACTCTATATAATGTATGCTATATAGAGTTAT | loxM7 |
| | (SEQ ID NO: 532) | |
| Tre | ACAACATCCTATTACACCCTATATGCCAACATGG | loxLTR |
| | (SEQ ID NO: 533) | |
| Brec1 | AACCCACTGCTTAAGCCTCAATAAAGCTTGCCTT | loxBTR |
| | (SEQ ID NO: 534) | |
| Cre-R3M3 | GATACAACGTATATACCTTTCTATACGTTGTTTA | loxK2 |
| | (SEQ ID NO: 535) | |

TABLE 8
Large serine integrases and SSR target sequences.

| | Recombinase recognition sequence | Recombinase recognition sequence |
|---|---|---|
| Recombinase | Left | Right |
| Bxb1 | GGTTTGTCTGGTCAACCACCGC | GGCTTGTCGACGACGGCGGTCTCC |
| | GGTCTCAGTGGTGTACGGTACA | GTCGTCAGGATCAT (SEQ ID NO: |
| | AACC (SEQ ID NO: 536) | 537) |
| phiC31 | GTGCCCCAACTGGGGTAACCTT | TGCGGGTGCCAGGGCGTGCCCTTG |
| | TGAGTTCTCTCAGTTGGGGG | GGCTCCCCGGGCGCGTACTCC (SEQ |
| | (SEQ ID NO: 538) | ID NO: 539) |
| R4 | TGTTCCCCAAAGCGATACCACT | GCATGTTCCCCAAAGCGATACCAC |
| | TGAAGCAGTGGTACTGCTTGTG | TTGAAGCAGTGGTACTGCTTGTGG |
| | GGTACA (SEQ ID NO: 540) | GTACACTCTGCGGGTG (SEQ ID NO: |
| | | 541) |
| phiBT1 | GGTGCTGGGTTGTTGTCTCTGG | CAGGTTTTTGACGAAAGTGATCCA |
| | ACAGTGATCCATGGGAAACTA | GATGATCCAG (SEQ ID NO: 543) |
| | CTCAGCACC (SEQ ID NO: 542) | |
| MJ1 (phiFC1) | ATTTTAGGTATATGATTTTGTT | CAAAGGATCACTGAATCAAAAGTA |
| | TATTAGTGTAAATAACACTATG | TTGCTCATCCACGCGAAA (SEQ ID |
| | TACCTAAAAT (SEQ ID NO: 544) | NO: 545) |
| MR11 | TTTGTGCGGAACTACGAACAGT | CGAAAATGTATGGAGGCACTTGTA |
| | TCATTAATACGAAGTGTACAA | TCAATATAGGATGTATACCTTCGA |
| | ACTTCCATACAA (SEQ ID NO: | AGACACTT (SEQ ID NO: 547) |
| | 546) | |
| TP901-1 | GAGTTTTTATTTCGTTTATTTCA | ATGCCAACACAATTAACATCTCAA |
| | ATTAAGGTAACTAAAAAACTC | TCAAGGTAAATGCTTTTTGCTTTTT |
| | CTTTTAAGG (SEQ ID NO: 548) | TTGC (SEQ ID NO: 549) |
| A118 | TTCCTCGTTTTCTCTCGTTGGA | TTTCGGATCAAGCTATGAAGGACG |
| | AGAAGAAGAAACGAGAAA | CAAAGAGGGAACTAAA (SEQ ID NO: |
| | (SEQ ID NO: 550) | 551) |
| U153 | TTCCTCGTTTTCTCTCGTTGGAC | TTTCGGATCAAGCTATGAAGGACG |
| | GGAAACGAATCGAGAAA (SEQ | CAAAGAGGGAACTAAA (SEQ ID |
| | ID NO: 552) | NO: 553) |
| phiRV1 | GTAGTGTATCTCACAGGTCCAC | GAAGGTGTTGGTGCGGGGTTGGCC |
| | GGTTGGCCGTGGACTGCTGAA | GTGGTCGAGGTGGGGT (SEQ ID NO: |
| | GAACATTCC (SEQ ID NO: 554) | 555) |
| phi370.1 | AAAAAAATACAGCGTTTTTCAT | TTGTAAAGGAGACTGATAATGGCA |
| | GTACAACTATACTAGTTGTAGT | TGTACAACTATACTCGTCGGTAAA |
| | GCCTAAAA (SEQ ID NO: 556) | AAGGCA (SEQ ID NO: 557) |
| TG1 | TCCAGCCCAACAGTGTTAGTCT | GATCAGCTCCGCGGGCAAGACCTT |
| | TTGCTCTTACCCAGTTGGGCGG | TCTCCTTCACGGGGTGGAAGGTC |
| | GA (SEQ ID NO: 558) | (SEQ ID NO: 559) |
| WB | CTAGTTTTAAAGTTGGTTATTA | CGGAAGGTAGCGTCAACGATAGGT |
| | GTTACTGTGATATTTATCACGG | GTAACTGTCGTGTTTGTAACGGTAC |
| | TACCCAATAACCAATGAAT | TTCCAACAGCTGGCGCCGCCAC |
| | (SEQ ID NO: 560) | (SEQ ID NO: 561) |
| BL3 | CAATGAAAAACTAGGCATGTA | TTTCCACAGACAACTCACGTGGAG |
| | GAAGTTGTTTGT (SEQ ID NO: | GTAGTCAC (SEQ ID NO: 563) |
| | 562) | |
| SprA | TGTAGTAAGTATCTTAATATAC | CACCCATTGTGTTCACAGGAGATA |
| | AGCTTTATCTGTTTTTTAAGAT | CAGCTTTATCTGTACTGATATTAAT |
| | ACTTACTACTTT (SEQ ID NO: | GACATGCTG (SEQ ID NO: 565) |
| | 564) | |
| phiJoe | AGTTGTGGCCATGTGTCCATCT | ATCTGGATGTGGGTGTCCATCTGCG |
| | GGGGGCAGATGGAGACGGGGT | GGCAGACGCCGCAGTCGAAGCACG |
| | CACA (SEQ ID NO: 566) | G (SEQ ID NO: 567) |
| — | — | ACCTTGATCTCGGTGTCCATCGCCG |
| | | GGCAGACGCCGCAGTCGAAGCACG |
| | | G (SEQ ID NO: 568) |
| phiK38 | CCCTAATACGCAAGTCGATAA | GAGCGCCGGATCAGGGAGTGGACG |
| | CTCTCCTGGGAGCGTTGACAAC | GCCTGGGAGCGCTACACGCTGTGG |
| | TTGCGCACCCTGATCTG (SEQ | CTGCGGTCGGTGC (SEQ ID NO: 570) |
| | ID NO: 569) | |
| Int2 | GCTCATGTATGTGTCTACGCGA | GGACGGCGCAGAAGGGGAGTAGCT |
| | GATTCTCGCCCGAGAACTTCTG | CTTCGCCGGACCGTCGACATACTG |
| | CAAGGCACTGCTCTTGGCT | CTCAGCTCGTC (SEQ ID NO: 572) |
| | (SEQ ID NO: 571) | |
| Int3 | ATGGATAAAAAAATACAGCGT | GTTTGTAAAGGAGACTGATAATGG |
| | TTTTCATGTACAACTATACTAG | CATGTACAACTATACTCGTCGGTA |
| | TTGTAGTGCCTAAATAATGCTT | AAAAGGCATCTTAT (SEQ ID NO: |
| | (SEQ ID NO: 573) | 574) |
| Int4 | AAAAATTACAAAGTTTTCAACC | TTCCAAAGAGCGCCCAACGCGACC |
| | CTTGATTTGAATTAGCGGTCAA | TGAAATTTGAATAAGACTGCTGCTT |
| | ATAATTTGTAATTCGTTT (SEQ | GTGTAAAGGCGATGATT (SEQ ID |
| | ID NO: 575) | NO: 576) |
| Int7 | GTGTTATAAACCTGTGTGAGAG | AGACGAGAAACGTTCCGTCCGTCT |
| | TTAAGTTTACATGCCTAACCTT | GGGTCAGTTGGGCAAAGTTGATGA |
| | AACTTTTACGCAGGTTCAGCTT | CCGGGTCGTCCGTT (SEQ ID NO: |
| | (SEQ ID NO: 577) | 578) |
| Int8 | TTAATAAACTATGGAAGTATGT | CAATCATCAGATAACTATGGCGGC |
| | ACAGTCTTGCAATGTTGAGTGA | ACGTGCATTAACCACGGTTGTATCC |
| | ACAAACTTCCATAATAAAAT | CGTCTAAAGTACTCGT (SEQ ID NO: |
| | (SEQ ID NO: 579) | 580) |
| Int9 | GTGGTTGTTTTTGTTGGAAGT | GTTTATATTGCGAAAAATAATTGGC |
| | TGTATCAGGTATCTGCATAGTT | GAACGAGGTAACTGGATACCTCAT |
| | ATTCCGAACTTCCAATTA (SEQ | CCGCCAATTAAAATTTG (SEQ ID |
| | ID NO: 581) | NO: 582) |
| Int10 | GGAAAATATAAATAATTTTAGT | AGCACGCTGATAATCAGCAAGACC |
| | AACCTACATCTCAATCAAGGAT | ACCAACATTTCCACCAATGTAAAA |
| | AGTAAAACTCTCACTCTT (SEQ | GCTTTAACCTTAGC (SEQ ID NO: |
| | ID NO: 583) | 584) |
| Int11 | GTTTATATGTTTACTAATAAGA | ATGGATTTTGCAGATTCCCAGATGC |
| | CGCTCTCAACCCATAAAGTCTT | CCCTACAGAAAGAGGTACAAAACA |
| | ATTAGTAAACATATTTCAACT | TTTATTGGAATTAATT (SEQ ID NO: |
| | (SEQ ID NO: 585) | 586) |
| Int12 | TTTTTGTATGTTAGTTGTGTCA | GTTCGTGGTAACTATGGGTGGTAC |
| | CTGGGTAGACCTAAATAGTGA | AGGTGCCACATTAGTTGTACCATTT |
| | CACAACTGCTATTAAAATTTAA | ATGTTTATGTGGTTAAC (SEQ ID |
| | (SEQ ID NO: 587) | NO: 588) |
| Int13 | CAATAACGGTTGTATTTGTAGA | GCATACATTGTTGTTGTTTTTCCAG |
| | ACTTGACCAGTTGTTTTAGTAA | ATCCAGTTGGTCCTGTAAATATAA |
| | CATAAATACAACTCCGAATA | GCAATCCATGTGAGT (SEQ ID NO: |
| | (SEQ ID NO: 589) | 590) |
| LI | GTTTAGTATCTCGTTATCTCTC | TAACTTTTTCGGATCGAGTTATGAT |
| | GTTGGAGGGAGAAGAAACGGG | GGACGTAAAGAGGGAACAAAGCA |
| | ATACCAAAA (SEQ ID NO: 591) | TCTA (SEQ ID NO: 592) |
| Peaches | TAGTTTCCAATGTTACAGGAAC | CGGTCTCCATCGGGATCTGCTGATC |
| | TGCTGGCAGAATCCAACACATT | GAGCAGCATGCCGACCA (SEQ ID |
| | GGAAGTCG (SEQ ID NO: 593) | NO: 594) |
| Bxz2 | TAACCGCAAGTGTACATCCCTC | CGGTCTCCATCGGGATCTGCTGATC |
| | GGCTGGCCGAGACAAGTACAG | GAGCAGCATGCCGACCA (SEQ ID |
| | TTGCGACAG (SEQ ID NO: 595) | NO: 596) |
| SV1 | ATGTGGTCCTTTAGATCCACTG | CATCAGGGCGGTCAGGCCGTAGAT |
| | ACGTGGGTCAGTGTCTCTAAAG | GTGGAAGAAACGGCAGCACGGCG |
| | GACTCGCG (SEQ ID NO: 597) | AGGACG (SEQ ID NO: 598) |

TABLE 9
Serine resolvases and SSR target sequences.

| | Recombinase recognition sequence | Recombinase recognition sequence |
|---|---|---|
| Resolvase | Left | Right |
| Gin | CGTTTCCTGTAAACCGAGGTTTTG | CGTTTCCTGTAAACCGAGGTTTTG |
| | GATAAACA (SEQ ID NO: 599) | GATAATGG (SEQ ID NO: 600) |
| Cin | GAGTTCTCTTAAACCAAGGTTTA | GAGTTCTCTTAAACCAAGGTATT |
| | GGATTGAAA (SEQ ID NO: 601) | GGATAACAG (SEQ ID NO: 602) |
| Hin | TGGTTCTTGAAAACCAAGGTTTTT | AAATTTTCCTTTTTGGAAGGTTTT |
| | GATAAAGC (SEQ ID NO: 603) | TGATAACCA (SEQ ID NO: 604) |
| Min | GCCTTCCCCTAAACCAACGTTTTT | GCCTTCCCCCAAACCAAGGTAAT |
| | ATGCCGCC (SEQ ID NO: 605) | CAAGAACGC (SEQ ID NO: 606) |
| Sin | TTGTGAAATTTGGGTACACCCTA | CGTATGATTAGGGTGTATATTAA |
| | ATCATACAA (SEQ ID NO: 607) | TTT (SEQ ID NO: 608) |

TABLE 10
Tyrosine integrases and target sequences.

| Integrase | attP | attB |
|---|---|---|
| HK022 | CAAATGATTTTATTTTGACTAATAA | GCACTTTAGGTGAAAAAGGT |
| | TGACCTACTTACATTAATTTACTGAT | T (SEQ ID NO: 610) |
| | AATTAAAGAGATTTTAAATATACAA | |
| | CTTATTCACCTAAAGGATGACAAAA | |
| | (SEQ ID NO: 609) | |
| | TAACATTAATCACTTAAAAATCATC | |
| | GCATTACACTAATCTGTGGTTAAAT | |
| | GATAGACTACATAATGCGACAAAA | |
| | CGCAACATATCCAGTCACTATGAAT | |
| | CAACTACTTAGATAGTATTAGTGAC | |
| | CT (SEQ ID NO: 611) | |
| P22 | CTAAGTGGTTTGGGACAAAAATGGG | GCAGCGCATTCGTAATGCGA |
| | ACATACAAATCTTTGCATCGGTTTG | AGGTCGT (SEQ ID NO: 613) |
| | CAAGGCTTTGCATGTCTTTCGAAGA | |
| | TGGGACGTGTGAGCGCAGGTATGAC | |
| | GTGGTATGTGTTGACTTAAAAGGTA | |
| | GTTCTTATAATTCGTAATGCGAAGG | |
| | TCGTAGGTTCGACTCCTATTATCGG | |
| | CACCAGTTAAATCAAATACTTACGT | |
| | ATTATTCGTGCCTTCCTTATTTTTAC | |
| | TGTGGGACATATTTGGGACAGAAGT | |
| | ACCAAAAA (SEQ ID NO: 612) | |
| L5 | GCGATCCCCATCCGCGACGTGCCAA | GAGCGGGCGACGGGAATCG |
| | CTAGGTCTCCTCTCGTCGTGAACAA | AACCCGCGTAGCTAGTTTGG |
| | GGCTACCGGGTTGCAACTCCTGTGC | AAGA (SEQ ID NO: 615) |
| | AACTCTCAGGCTTCAACGCGCTTCT | |
| | ACGACCTGCAATTTCTTTCCACTTA | |
| | GAGGATGCAGCCGAGAGGGGTAAA | |
| | AACCTATCTTGACCGGCCCATATGT | |
| | GGTCGGCAGACACCCATTCTTCCAA | |
| | ACTAGCTACGCGGGTTCGATTCCCG | |
| | TCGCCCGCTCCGCTGGTCAGAGGGT | |
| | GTTTTCGCCCTCTGGCCATTTTTCTT | |
| | TCCAGGGGTCTGCAACTCTTGTGCG | |
| | ACTCTTCTGACCTGGGCATACGCGG | |
| | TTGCAACGCATCCCTGATCTGGCTA | |
| | CTTTCGATGCTGACAAACGAATAGA | |
| | GCCCCCCGCCTGCGCGAACAGACG | |
| | AGGGGCATTCACA (SEQ ID NO: 614) | |

[1039] In various other aspects, the present disclosure relates to methods of using PE to install one or more recombinase recognition sequence and their use in site-specific recombination.

[1040] In some embodiments, the site-specific recombination may effectuate a variety of recombination outcomes, such as, excision, integration, inversion, or exchange of DNA fragments.

[1041] In some embodiments, the methods are useful for inducing recombination of or between two or more regions of two or more nucleic acid (e.g., DNA) molecules. In other embodiments, the methods are useful for inducing recombination of or between two or more regions in a single nucleic acid molecule (e.g., DNA).

[1042] In some embodiments, the disclosure provides a method for integrating a donor DNA template by site-specific recombination, comprising: (a) installing a recombinase recognition sequence at a genomic locus by prime editing; (b) contacting the genomic locus with a DNA donor template that also comprises the recombinase recognition sequence in the presence of a recombinase.

[1043] In other embodiments, the disclosure provides a method for deleting a genomic region by site-specific recombination, comprising: (a) installing a pair of recombinase recognition sequences at a genomic locus by prime editing; (b) contacting the genomic locus with a recombinase, thereby catalyzing the deletion of the genomic region between the pair of recombinase recognition sequences.

[1044] In yet other embodiments, the disclosure provides a method for inverting a genomic region by site-specific recombination, comprising: (a) installing a pair of recombinase recognition sequences at a genomic locus by prime editing; (b) contacting the genomic locus with a recombinase, thereby catalyzing the inversion of the genomic region between the pair of recombinase recognition sequences.

[1045] In still other embodiments, the disclosure provides a method for inducing chromosomal translocation between a first genomic site and a second genomic site, comprising: (a) installing a first recombinase recognition sequence at a first genomic locus by prime editing; (b) installing a second recombinase recognition sequence at a second genomic locus by prime editing; (c) contacting the first and the second genomic loci with a recombinase, thereby catalyzing the chromosomal translocation of the first and second genomic loci.

[1046] In other embodiments, the disclosure provides a method for inducing cassette exchange between a genomic locus and a donor DNA comprising a cassette, comprising: (a) installing a first recombinase recognition sequence at a first genomic locus by prime editing; (b) installing a second recombinase recognition sequence at a second genomic locus by prime editing; (c) contacting the first and the second genomic loci with a donor DNA comprising a cassette that is flanked by the first and second recombinase recognition sequences and a recombinase, thereby catalyzing the exchange of the flanked genomic locus and the cassette in the DNA donor.

[1047] In various embodiments involving the insertion of more than one recombinase recognition sequences in the genome, the recombinase recognition sequences can be the same or different. In some embodiments, the recombinase recognition sequences are the same. In other embodiments, that recombinase recognition sequences are different.

[1048] In various embodiments, the recombinase can be a tyrosine recombinase, such as Cre, Dre, Vcre, Scre, Flp, B2, B3, Kw, R, TD1-40, Vika, Nigri, Panto, Kd, Fre, Cre(ALSHG), Tre, Brec1, or Cre-R3M3, as shown in Table 7. In such embodiments, the recombinase recognition sequence may be an RRS of Table 7 that corresponds to the recombinase under use.

[1049] In various other embodiments, the recombinase can be a large serine recombinase, such as Bxb1, PhiC31, R4, phiBT1, MJ1, MR11, TP901-1, A118, V153, phiRV1, phi370.1, TG1, WB, BL3, SprA, phiJoe, phiK38, Int2, Int3, Int4, Int7, Int8, Int9, Int10, Int11, Int12, Int13, L1, peaches, Bxz2, or SV1, as shown in Table 8. In such embodiments, the recombinase recognition sequence may be an RRS of Table 8 that corresponds to the recombinase under use.

[1050] In still other embodiments, the recombinase can be a serine recombinase, such as Bxb1, PhiC31, R4, phiBT1, MJ1, MR11, TP901-1, A118, V153, phiRV1, phi370.1, TG1, WB, BL3, SprA, phiJoe, phiK38, Int2, Int3, Int4, Int7, Int8, Int9, Int10, Int11, Int12, Int13, L1, peaches, Bxz2, or SV1, as shown in Table 8. In such embodiments, the recombinase recognition sequence may be an RRS of Table 8 that corresponds to the recombinase under use.

[1051] In other embodiments, the recombinase can be a serine resolvase, such as Gin, Cin, Hin, Min, or Sin, as shown in Table 9. In such embodiments, the recombinase recognition sequence may be an RRS of Table 9 that corresponds to the recombinase under use.

[1052] In various other embodiments, the recombinase can be a tyrosine integrase, such as HK022, P22, or L5, as shown in Table 10. In such embodiments, the recombinase recognition sequence may be an RRS of Table 10 that corresponds to the recombinase under use.

[1053] In some embodiments, any of the methods for site-specific recombination with PE can be performed in vivo or in vitro. In some embodiments, any of the methods for site-specific recombination are performed in a cell (e.g., recombine genomic DNA in a cell). The cell can be prokaryotic or eukaryotic. The cell, such as a eukaryotic cell, can be in an individual, such as a subject, as described herein (e.g., a human subject). The methods described herein are useful for the genetic modification of cells in vitro and in vivo, for example, in the context of the generation of transgenic cells, cell lines, or animals, or in the alteration of genomic sequence, e.g., the correction of a genetic defect, in a cell in a subject.

### References Cited for Section L

[1054] Each of the following references are cited in Example 17, each of which are incorporated herein by reference.
[1055] 1. Feuk, L. Inversion variants in the human genome: role in disease and genome architecture. Genome Med 2, 11 (2010).
[1056] 2. Zhang, F., Gu, W., Hurles, M. E. & Lupski, J. R. Copy number variation in human health, disease, and evolution. Annu Rev Genomics Hum Genet 10, 451-481 (2009).
[1057] 3. Shaw, C. J. & Lupski, J. R. Implications of human genome architecture for rearrangement-based disorders: the genomic basis of disease. Hum Mol Genet 13 Spec No 1, R57-64 (2004).
[1058] 4. Carvalho, C. M., Zhang, F. & Lupski, J. R. Evolution in health and medicine Sackler colloquium: Genomic disorders: a window into human gene and genome evolution. Proc Natl Acad Sci USA 107 Suppl 1, 1765-1771 (2010).
[1059] 5. Rowley, J. D. Chromosome translocations: dangerous liaisons revisited. Nat Rev Cancer 1, 245-250 (2001).
[1060] 6. Aplan, P. D. Causes of oncogenic chromosomal translocation. Trends Genet 22, 46-55 (2006).
[1061] 7. McCarroll, S. A. & Altshuler, D. M. Copy-number variation and association studies of human disease. Nat Genet 39, S37-42 (2007).

### [8] Methods of Treatment

[1062] The instant disclosure provides methods for the treatment of a subject diagnosed with a disease associated with or caused by a point mutation, or other mutations (e.g., deletion, insertion, inversion, duplication, etc.) that can be corrected by the prime editing system provided herein, as exemplified, but not limited to prion disease (e.g., Example 5 herein), trinucleotide repeat expansion disease (e.g., Example 3 herein), or CDKL5 Deficiency Disorder (CDD) (e.g., Example 23 herein).

[1063] Virtually any disease-causing genetic defect may be repaired by using prime editing, which includes the selection of an appropriate prime editor fusion protein (including a napDNAbp and a polymerase (e.g., a reverse transcriptase), and designing of an appropriate PEgRNA designed to (a) target the appropriate target DNA containing an edit site, and (b) provide a template for the synthesis of a single strand of DNA from the 3′ end of the nick site that includes the desired edit which displaces and replaces the endogenous strand immediately downstream of the nick site. Prime editing can be used, without limitation, to (a) install mutation-correcting changes to a nucleotide sequence, (b) install protein and RNA tags, (c) install immunoepitopes on proteins of interest, (d) install inducible dimerization domains in proteins, (e) install or remove sequences to alter that activity of a biomolecule, (f) install recombinase target sites to direct specific genetic changes, and (g) mutagenesis of a target sequence by using an error-prone RT.

[1064] The method of treating a disorder can involve as an early step the design of an appropriate PEgRNA and prime editor fusion protein in accordance with the methods described herein, which include a number of considerations that may be taken into account, such as:

(a) the target sequence, i.e., the nucleotide sequence in which one or more nucleobase modifications are desired to be installed by the prime editor;
(b) the location of the cut site within the target sequence, i.e., the specific nucleobase position at which the prime editor will induce a single-stand nick to create a 3′ end RT primer sequence on one side of the nick and the 5′ end endogenous flap on the other side of the nick (which ultimately is removed by FEN1 or equivalent thereto and replaced by the 3′ ssDNA flap. The cut site creates the 3′ end primer sequence which becomes extended by the polymerase of the PE fusion protein (e.g., a RT enzyme) during RNA-dependent DNA polymerization to create the 3′ ssDNA flap containing the desired edit, which then replaces the 5′ endogenous DNA flap in the target sequence.
(c) the available PAM sequences (including the canonical SpCas9 PAM sites, as well as non-canonical PAM sites recognized by Cas9 variants and equivalents with expanded or differing PAM specificities);
(d) the spacing between the available PAM sequences and the location of the cut site in the PAM strand;
(e) the particular Cas9, Cas9 variant, or Cas9 equivalent of the prime editor available to be used (which in part is dictated by the available PAM);
(f) the sequence and length of the primer binding site;
(g) the sequence and length of the edit template;
(h) the sequence and length of the homology arm;
(i) the spacer sequence and length; and
(j) the gRNA core sequence.

[1065] A suitable PEgRNA, and optionally a nicking-sgRNA design guide for second-site nicking, can be designed by way of the following exemplary step-by-step set of instructions which takes into account one or more of the above considerations. The steps reference the examples shown in FIGS. 70A-70I.

1. Define the target sequence and the edit. Retrieve the sequence of the target DNA region (˜200 bp) centered around the location of the desired edit (point mutation, insertion, deletion, or combination thereof). See FIG. 70A.
2. Locate target PAMs. Identify PAMs in the proximity to the desired edit location. PAMs can be identified on either strand of DNA proximal to the desired edit location. While PAMs close to the edit position are preferred (i.e., wherein the nick site is less than 30 nt from the edit position, or less than 29 nt, 28 nt, 27 nt, 26 nt, 25 nt, 24 nt, 23 nt, 22 nt, 21 nt, 20 nt, 19 nt, 18 nt, 17 nt, 16 nt, 15 nt, 14 nt, 13 nt, 12 nt, 11 nt, 10 nt, 9 nt, 8 nt, 7 nt, 6 nt, 5 nt, 4 nt, 3 nt, or 2 nt from the edit position to the nick site), it is possible to install edits using protospacers and PAMs that place the nick ≥30 nt from the edit position. See FIG. 70B.
3. Locate the nick sites. For each PAM being considered, identify the corresponding nick site and on which strand. For Sp Cas9 H840A nickase, cleavage occurs in the PAM-containing strand between the 3^{rd} and 4^{th} bases 5′ to the NGG PAM. All edited nucleotides must exist 3′ of the nick site, so appropriate PAMs must place the nick 5′ to the target edit on the PAM-containing strand. In the example shown below, there are two possible PAMs. For simplicity, the remaining steps will demonstrate the design of a PEgRNA using PAM 1 only. See FIG. 70C.
4. Design the spacer sequence. The protospacer of SpCas9 corresponds to the 20 nucleotides 5′ to the NGG PAM on the PAM-containing strand. Efficient Pol III transcription initiation requires a G to be the first transcribed nucleotide. If the first nucleotide of the protospacer is a G, the spacer sequence for the PEgRNA is simply the protospacer sequence. If the first nucleotide of the protospacer is not a G, the spacer sequence of the PEgRNA is G followed by the protospacer sequence. See FIG. 70D.
5. Design a primer binding site (PBS). Using the starting allele sequence, identify the DNA primer on the PAM-containing strand. The 3′ end of the DNA primer is the nucleotide just upstream of the nick site (i.e. the 4^{th} base 5′ to the NGG PAM for Sp Cas9). As a general design principle for use with PE2 and PE3, a PEgRNA primer binding site (PBS) containing 12 to 13 nucleotides of complementarity to the DNA primer can be used for sequences that contain ˜40-60% GC content. For sequences with low GC content, longer (14- to 15-nt) PBSs should be tested. For sequences with higher GC content, shorter (8- to 11-nt) PBSs should be tested. Optimal PBS sequences should be determined empirically, regardless of GC content. To design a length-p PBS sequence, take the reverse complement of the first p nucleotides 5′ of the nick site in the PAM-containing strand using the starting allele sequence. See FIG. 70E.
6. Design an RT template (or DNA synthesis template). The RT template (or DNA synthesis template where the polymerase is not reverse transcriptase) encodes the designed edit and homology to the sequence adjacent to the edit. In one embodiment, these regions correspond to the DNA synthesis template of FIG. 3D and FIG. 3E, wherein the DNA synthesis template comprises the “edit template” and the “homology arm.” Optimal RT template lengths vary based on the target site. For short-range edits (positions +1 to +6), it is recommended to test a short (9 to 12 nt), a medium (13 to 16 nt), and a long (17 to 20 nt) RT template. For long-range edits (positions +7 and beyond), it is recommended to use RT templates that extend at least 5 nt (preferably 10 or more nt) past the position of the edit to allow for sufficient 3′ DNA flap homology. For long-range edits, several RT templates should be screened to identify functional designs. For larger insertions and deletions (≥5 nt), incorporation of greater 3′ homology (˜20 nt or more) into the RT template is recommended. Editing efficiency is typically impaired when the RT template encodes the synthesis of a G as the last nucleotide in the reverse transcribed DNA product (corresponding to a C in the RT template of the PEgRNA). As many RT templates support efficient prime editing, avoidance of G as the final synthesized nucleotide is recommended when designing RT templates. To design a length-r RT template sequence, use the desired allele sequence and take the reverse complement of the first r nucleotides 3′ of the nick site in the strand that originally contained the PAM. Note that compared to SNP edits, insertion or deletion edits using RT templates of the same length will not contain identical homology. See FIG. 70F.
7. Assemble the full PEgRNA sequence. Concatenate the PEgRNA components in the following order (5′ to 3′): spacer, scaffold, RT template and PBS. See FIG. 70G.
8. Designing nicking-sgRNAs for PE3. Identify PAMs on the non-edited strand upstream and downstream of the edit. Optimal nicking positions are highly locus-dependent and should be determined empirically. In general, nicks placed 40 to 90 nucleotides 5′ to the position across from the PEgRNA-induced nick lead to higher editing yields and fewer indels. A nicking sgRNA has a spacer sequence that matches the 20-nt protospacer in the starting allele, with the addition of a 5′-G if the protospacer does not begin with a G. See FIG. 70H.
9. Designing PE3b nicking-sgRNAs. If a PAM exists in the complementary strand and its corresponding protospacer overlaps with the sequence targeted for editing, this edit could be a candidate for the PE3b system. In the PE3b system, the spacer sequence of the nicking-sgRNA matches the sequence of the desired edited allele, but not the starting allele. The PE3b system operates efficiently when the edited nucleotide(s) falls within the seed region (˜10 nt adjacent to the PAM) of the nicking-sgRNA protospacer. This prevents nicking of the complementary strand until after installation of the edited strand, preventing competition between the PEgRNA and the sgRNA for binding the target DNA. PE3b also avoids the generation of simultaneous nicks on both strands, thus reducing indel formation significantly while maintaining high editing efficiency. PE3b sgRNAs should have a spacer sequence that matches the 20-nt protospacer in the desired allele, with the addition of a 5′ G if needed. See FIG. 70I.

[1066] The above step-by-step process for designing a suitable PEgRNA and a second-site nicking sgRNA is not meant to be limiting in any way. The disclosure contemplates variations of the above-described step-by-step process which would be derivable therefrom by a person of ordinary skill in the art.

[1067] Once a suitable PEgRNA and PE fusion protein are selected/designed, they may be administered by a suitable methodology, such as by vector-based transfection (in which one or more vectors comprising DNA encoding the PEgRNA and the PE fusion protein and which are expressed within a cell upon transfection with the vectors), direct delivery of the PE fusion protein complexed with the PEgRNA (e.g., RNP delivery) in a delivery format (e.g., lipid particles, nanoparticles), or by a mRNA-based delivery system. Such methods are described herein in the present disclosure and any know method may be utilized.

[1068] The PEgRNA and PE fusion protein (or together, referred to as the PE complex) can be delivered to a cell in a therapeutically effective amount such that upon contacting the target DNA of interest, the desired edit becomes installed therein.

[1069] Any disease is conceivably treatable by such methods so long as delivery to the appropriate cells is feasible. The person having ordinary skill in the art will be able to choose and/or select a PE delivery methodology to suit the intended purpose and the intended target cells.

[1070] For example, in some embodiments, a method is provided that comprises administering to a subject having such a disease, e.g., a cancer associated with a point mutation as described above, an effective amount of the prime editing system described herein that corrects the point mutation or introduces a deactivating mutation into a disease-associated gene as mediated by homology-directed repair in the presence of a donor DNA molecule comprising desired genetic change. In some embodiments, a method is provided that comprises administering to a subject having such a disease, e.g., a cancer associated with a point mutation as described above, an effective amount of the prime editing system described herein that corrects the point mutation or introduces a deactivating mutation into a disease-associated gene. In some embodiments, the disease is a proliferative disease. In some embodiments, the disease is a genetic disease. In some embodiments, the disease is a neoplastic disease. In some embodiments, the disease is a metabolic disease. In some embodiments, the disease is a lysosomal storage disease. Other diseases that can be treated by correcting a point mutation or introducing a deactivating mutation into a disease-associated gene will be known to those of skill in the art, and the disclosure is not limited in this respect.

[1071] The instant disclosure provides methods for the treatment of additional diseases or disorders, e.g., diseases or disorders that are associated or caused by a point mutation that can be corrected by TPRT-mediated gene editing. Some such diseases are described herein, and additional suitable diseases that can be treated with the strategies and fusion proteins provided herein will be apparent to those of skill in the art based on the instant disclosure. Exemplary suitable diseases and disorders are listed below. It will be understood that the numbering of the specific positions or residues in the respective sequences depends on the particular protein and numbering scheme used. Numbering might be different, e.g., in precursors of a mature protein and the mature protein itself, and differences in sequences from species to species may affect numbering. One of skill in the art will be able to identify the respective residue in any homologous protein and in the respective encoding nucleic acid by methods well known in the art, e.g., by sequence alignment and determination of homologous residues. Exemplary suitable diseases and disorders include, without limitation: 2-methyl-3-hydroxybutyric aciduria; 3 beta-Hydroxysteroid dehydrogenase deficiency; 3-Methylglutaconic aciduria; 3-Oxo-5 alpha-steroid delta 4-dehydrogenase deficiency; 46,XY sex reversal, type 1, 3, and 5; 5-Oxoprolinase deficiency; 6-pyruvoyl-tetrahydropterin synthase deficiency; Aarskog syndrome; Aase syndrome; Achondrogenesis type 2; Achromatopsia 2 and 7; Acquired long QT syndrome; Acrocallosal syndrome, Schinzel type; Acrocapitofemoral dysplasia; Acrodysostosis 2, with or without hormone resistance; Acroerythrokeratoderma; Acromicric dysplasia; Acth-independent macronodular adrenal hyperplasia 2; Activated PI3K-delta syndrome; Acute intermittent porphyria; deficiency of Acyl-CoA dehydrogenase family, member 9; Adams-Oliver syndrome 5 and 6; Adenine phosphoribosyltransferase deficiency; Adenylate kinase deficiency; hemolytic anemia due to Adenylosuccinate lyase deficiency; Adolescent nephronophthisis; Renal-hepatic-pancreatic dysplasia; Meckel syndrome type 7; Adrenoleukodystrophy; Adult junctional epidermolysis bullosa; Epidermolysis bullosa, junctional, localisata variant; Adult neuronal ceroid lipofuscinosis; Adult neuronal ceroid lipofuscinosis; Adult onset ataxia with oculomotor apraxia; ADULT syndrome; Afibrinogenemia and congenital Afibrinogenemia; autosomal recessive Agammaglobulinemia 2; Age-related macular degeneration 3, 6, 11, and 12; Aicardi Goutieres syndromes 1, 4, and 5; Chilbain lupus 1; Alagille syndromes 1 and 2; Alexander disease; Alkaptonuria; Allan-Herndon-Dudley syndrome; Alopecia universalis congenital; Alpers encephalopathy; Alpha-1-antitrypsin deficiency; autosomal dominant, autosomal recessive, and X-linked recessive Alport syndromes; Alzheimer disease, familial, 3, with spastic paraparesis and apraxia; Alzheimer disease, types, 1, 3, and 4; hypocalcification type and hypomaturation type, IIA1 Amelogenesis imperfecta; Aminoacylase 1 deficiency; Amish infantile epilepsy syndrome; Amyloidogenic transthyretin amyloidosis; Amyloid Cardiomyopathy, Transthyretin-related; Cardiomyopathy; Amyotrophic lateral sclerosis types 1, 6, 15 (with or without frontotemporal dementia), 22 (with or without frontotemporal dementia), and 10; Frontotemporal dementia with TDP43 inclusions, TARDBP-related; Andermann syndrome; Andersen Tawil syndrome; Congenital long QT syndrome; Anemia, nonspherocytic hemolytic, due to G6PD deficiency; Angelman syndrome; Severe neonatal-onset encephalopathy with microcephaly; susceptibility to Autism, X-linked 3; Angiopathy, hereditary, with nephropathy, aneurysms, and muscle cramps; Angiotensin i-converting enzyme, benign serum increase; Aniridia, cerebellar ataxia, and mental retardation; Anonychia; Antithrombin III deficiency; Antley-Bixler syndrome with genital anomalies and disordered steroidogenesis; Aortic aneurysm, familial thoracic 4, 6, and 9; Thoracic aortic aneurysms and aortic dissections; Multisystemic smooth muscle dysfunction syndrome; Moyamoya disease 5; Aplastic anemia; Apparent mineralocorticoid excess; Arginase deficiency; Argininosuccinate lyase deficiency; Aromatase deficiency; Arrhythmogenic right ventricular cardiomyopathy types 5, 8, and 10; Primary familial hypertrophic cardiomyopathy; Arthrogryposis multiplex congenita, distal, X-linked; Arthrogryposis renal dysfunction cholestasis syndrome; Arthrogryposis, renal dysfunction, and cholestasis 2; Asparagine synthetase deficiency; Abnormality of neuronal migration; Ataxia with vitamin E deficiency; Ataxia, sensory, autosomal dominant; Ataxia-telangiectasia syndrome; Hereditary cancer-predisposing syndrome; Atransferrinemia; Atrial fibrillation, familial, 11, 12, 13, and 16; Atrial septal defects 2, 4, and 7 (with or without atrioventricular conduction defects); Atrial standstill 2; Atrioventricular septal defect 4; Atrophia bulborum hereditaria; ATR-X syndrome; Auriculocondylar syndrome 2; Autoimmune disease, multisystem, infantile-onset; Autoimmune lymphoproliferative syndrome, type 1a; Autosomal dominant hypohidrotic ectodermal dysplasia; Autosomal dominant progressive external ophthalmoplegia with mitochondrial DNA deletions 1 and 3; Autosomal dominant torsion dystonia 4; Autosomal recessive centronuclear myopathy; Autosomal recessive congenital ichthyosis 1, 2, 3, 4A, and 4B; Autosomal recessive cutis laxa type IA and 1B; Autosomal recessive hypohidrotic ectodermal dysplasia syndrome; Ectodermal dysplasia 11b; hypohidrotic/hair/tooth type, autosomal recessive; Autosomal recessive hypophosphatemic bone disease; Axenfeld-Rieger syndrome type 3; Bainbridge-Ropers syndrome; Bannayan-Riley-Ruvalcaba syndrome; PTEN hamartoma tumor syndrome; Baraitser-Winter syndromes 1 and 2; Barakat syndrome; Bardet-Biedl syndromes 1, 11, 16, and 19; Bare lymphocyte syndrome type 2, complementation group E; Bartter syndrome antenatal type 2; Bartter syndrome types 3, 3 with hypocalciuria, and 4; Basal ganglia calcification, idiopathic, 4; Beaded hair; Benign familial hematuria; Benign familial neonatal seizures 1 and 2; Seizures, benign familial neonatal, 1, and/or myokymia; Seizures, Early infantile epileptic encephalopathy 7; Benign familial neonatal-infantile seizures; Benign hereditary chorea; Benign scapuloperoneal muscular dystrophy with cardiomyopathy; Bernard-Soulier syndrome, types A1 and A2 (autosomal dominant); Bestrophinopathy, autosomal recessive; beta Thalassemia; Bethlem myopathy and Bethlem myopathy 2; Bietti crystalline corneoretinal dystrophy; Bile acid synthesis defect, congenital, 2; Biotinidase deficiency; Birk Barel mental retardation dysmorphism syndrome; Blepharophimosis, ptosis, and epicanthus inversus; Bloom syndrome; Borjeson-Forssman-Lehmann syndrome; Boucher Neuhauser syndrome; Brachydactyly types A1 and A2; Brachydactyly with hypertension; Brain small vessel disease with hemorrhage; Branched-chain ketoacid dehydrogenase kinase deficiency; Branchiootic syndromes 2 and 3; Breast cancer, early-onset; Breast-ovarian cancer, familial 1, 2, and 4; Brittle cornea syndrome 2; Brody myopathy; Bronchiectasis with or without elevated sweat chloride 3; Brown-Vialetto-Van laere syndrome and Brown-Vialetto-Van Laere syndrome 2; Brugada syndrome; Brugada syndrome 1; Ventricular fibrillation; Paroxysmal familial ventricular fibrillation; Brugada syndrome and Brugada syndrome 4; Long QT syndrome; Sudden cardiac death; Bull eye macular dystrophy; Stargardt disease 4; Cone-rod dystrophy 12; Bullous ichthyosiform erythroderma; Burn-Mckeown syndrome; Candidiasis, familial, 2, 5, 6, and 8; Carbohydrate-deficient glycoprotein syndrome type I and II; Carbonic anhydrase VA deficiency, hyperammonemia due to; Carcinoma of colon; Cardiac arrhythmia; Long QT syndrome, LQT1 subtype; Cardioencephalomyopathy, fatal infantile, due to cytochrome c oxidase deficiency; Cardiofaciocutaneous syndrome; Cardiomyopathy; Danon disease; Hypertrophic cardiomyopathy; Left ventricular noncompaction cardiomyopathy; Carnevale syndrome; Carney complex, type 1; Carnitine acylcarnitine translocase deficiency; Carnitine palmitoyltransferase I, II, II (late onset), and II (infantile) deficiency; Cataract 1, 4, autosomal dominant, autosomal dominant, multiple types, with microcornea, coppock-like, juvenile, with microcornea and glucosuria, and nuclear diffuse nonprogressive; Catecholaminergic polymorphic ventricular tachycardia; Caudal regression syndrome; Cd8 deficiency, familial; Central core disease; Centromeric instability of chromosomes 1, 9 and 16 and immunodeficiency; Cerebellar ataxia infantile with progressive external ophthalmoplegi and Cerebellar ataxia, mental retardation, and dysequilibrium syndrome 2; Cerebral amyloid angiopathy, APP-related; Cerebral autosomal dominant and recessive arteriopathy with subcortical infarcts and leukoencephalopathy; Cerebral cavernous malformations 2; Cerebrooculofacioskeletal syndrome 2; Cerebro-oculo-facio-skeletal syndrome; Cerebroretinal microangiopathy with calcifications and cysts; Ceroid lipofuscinosis neuronal 2, 6, 7, and 10; Ch\xc3\xa9diak-Higashi syndrome, Chediak-Higashi syndrome, adult type; Charcot-Marie-Tooth disease types 1B, 2B2, 2C, 2F, 2I, 2U (axonal), 1C (demyelinating), dominant intermediate C, recessive intermediate A, 2A2, 4C, 4D, 4H, IF, IVF, and X; Scapuloperoneal spinal muscular atrophy; Distal spinal muscular atrophy, congenital nonprogressive; Spinal muscular atrophy, distal, autosomal recessive, 5; CHARGE association; Childhood hypophosphatasia; Adult hypophosphatasia; Cholecystitis; Progressive familial intrahepatic cholestasis 3; Cholestasis, intrahepatic, of pregnancy 3; Cholestanol storage disease; Cholesterol monooxygenase (side-chain cleaving) deficiency; Chondrodysplasia Blomstrand type; Chondrodysplasia punctata 1, X-linked recessive and 2 X-linked dominant; CHOPS syndrome; Chronic granulomatous disease, autosomal recessive cytochrome b-positive, types 1 and 2; Chudley-McCullough syndrome; Ciliary dyskinesia, primary, 7, 11, 15, 20 and 22; Citrullinemia type I; Citrullinemia type I and II; Cleidocranial dysostosis; C-like syndrome; Cockayne syndrome type A, Coenzyme Q10 deficiency, primary 1, 4, and 7; Coffin Siris/Intellectual Disability; Coffin-Lowry syndrome; Cohen syndrome, Cold-induced sweating syndrome 1; COLE-CARPENTER SYNDROME 2; Combined cellular and humoral immune defects with granulomas; Combined d-2- and 1-2-hydroxyglutaric aciduria; Combined malonic and methylmalonic aciduria; Combined oxidative phosphorylation deficiencies 1, 3, 4, 12, 15, and 25; Combined partial and complete 17-alpha-hydroxylase/17,20-lyase deficiency; Common variable immunodeficiency 9; Complement component 4, partial deficiency of, due to dysfunctional c1 inhibitor; Complement factor B deficiency; Cone monochromatism; Cone-rod dystrophy 2 and 6; Cone-rod dystrophy amelogenesis imperfecta; Congenital adrenal hyperplasia and Congenital adrenal hypoplasia, X-linked; Congenital amegakaryocytic thrombocytopenia; Congenital aniridia; Congenital central hypoventilation; Hirschsprung disease 3; Congenital contractural arachnodactyly; Congenital contractures of the limbs and face, hypotonia, and developmental delay; Congenital disorder of glycosylation types 1B, 1D, 1G, 1H, 1J, 1K, iN, 1P, 2C, 2J, 2K, IIm; Congenital dyserythropoietic anemia, type I and II; Congenital ectodermal dysplasia of face; Congenital erythropoietic porphyria; Congenital generalized lipodystrophy type 2; Congenital heart disease, multiple types, 2; Congenital heart disease; Interrupted aortic arch; Congenital lipomatous overgrowth, vascular malformations, and epidermal nevi; Non-small cell lung cancer; Neoplasm of ovary; Cardiac conduction defect, nonspecific; Congenital microvillous atrophy; Congenital muscular dystrophy; Congenital muscular dystrophy due to partial LAMA2 deficiency; Congenital muscular dystrophy-dystroglycanopathy with brain and eye anomalies, types A2, A7, A8, A11, and A14; Congenital muscular dystrophy-dystroglycanopathy with mental retardation, types B2, B3, B5, and B15; Congenital muscular dystrophy-dystroglycanopathy without mental retardation, type B5; Congenital muscular hypertrophy-cerebral syndrome; Congenital myasthenic syndrome, acetazolamide-responsive; Congenital myopathy with fiber type disproportion; Congenital ocular coloboma; Congenital stationary night blindness, type 1A, 1B, 1C, 1E, 1F, and 2A; Coproporphyria; Cornea plana 2; Corneal dystrophy, Fuchs endothelial, 4; Corneal endothelial dystrophy type 2; Corneal fragility keratoglobus, blue sclerae and joint hypermobility; Cornelia de Lange syndromes 1 and 5; Coronary artery disease, autosomal dominant 2; Coronary heart disease; Hyperalphalipoproteinemia 2; Cortical dysplasia, complex, with other brain malformations 5 and 6; Cortical malformations, occipital; Corticosteroid-binding globulin deficiency; Corticosterone methyloxidase type 2 deficiency; Costello syndrome; Cowden syndrome 1; Coxa plana; Craniodiaphyseal dysplasia, autosomal dominant; Craniosynostosis 1 and 4; Craniosynostosis and dental anomalies; Creatine deficiency, X-linked; Crouzon syndrome; Cryptophthalmos syndrome; Cryptorchidism, unilateral or bilateral; Cushing symphalangism; Cutaneous malignant melanoma 1; Cutis laxa with osteodystrophy and with severe pulmonary, gastrointestinal, and urinary abnormalities; Cyanosis, transient neonatal and atypical nephropathic; Cystic fibrosis; Cystinuria; Cytochrome c oxidase i deficiency; Cytochrome-c oxidase deficiency; D-2-hydroxyglutaric aciduria 2; Darier disease, segmental; Deafness with labyrinthine aplasia microtia and microdontia (LAMM); Deafness, autosomal dominant 3a, 4, 12, 13, 15, autosomal dominant nonsyndromic sensorineural 17, 20, and 65; Deafness, autosomal recessive 1A, 2, 3, 6, 8, 9, 12, 15, 16, 18b, 22, 28, 31, 44, 49, 63, 77, 86, and 89; Deafness, cochlear, with myopia and intellectual impairment, without vestibular involvement, autosomal dominant, X-linked 2; Deficiency of 2-methylbutyryl-CoA dehydrogenase; Deficiency of 3-hydroxyacyl-CoA dehydrogenase; Deficiency of alpha-mannosidase; Deficiency of aromatic-L-amino-acid decarboxylase; Deficiency of bisphosphoglycerate mutase; Deficiency of butyryl-CoA dehydrogenase; Deficiency of ferroxidase; Deficiency of galactokinase; Deficiency of guanidinoacetate methyltransferase; Deficiency of hyaluronoglucosaminidase; Deficiency of ribose-5-phosphate isomerase; Deficiency of steroid 11-beta-monooxygenase; Deficiency of UDPglucose-hexose-1-phosphate uridylyltransferase; Deficiency of xanthine oxidase; Dejerine-Sottas disease; Charcot-Marie-Tooth disease, types ID and IVF; Dejerine-Sottas syndrome, autosomal dominant; Dendritic cell, monocyte, B lymphocyte, and natural killer lymphocyte deficiency; Desbuquois dysplasia 2; Desbuquois syndrome; DFNA 2 Nonsyndromic Hearing Loss; Diabetes mellitus and insipidus with optic atrophy and deafness; Diabetes mellitus, type 2, and insulin-dependent, 20; Diamond-Blackfan anemia 1, 5, 8, and 10; Diarrhea 3 (secretory sodium, congenital, syndromic) and 5 (with tufting enteropathy, congenital); Dicarboxylic aminoaciduria; Diffuse palmoplantar keratoderma, Bothnian type; Digitorenocerebral syndrome; Dihydropteridine reductase deficiency; Dilated cardiomyopathy 1A, 1AA, 1C, 1G, 1BB, 1DD, 1FF, 1HH, 11, 1KK, 1N, 1S, 1Y, and 3B; Left ventricular noncompaction 3; Disordered steroidogenesis due to cytochrome p450 oxidoreductase deficiency; Distal arthrogryposis type 2B; Distal hereditary motor neuronopathy type 2B; Distal myopathy Markesbery-Griggs type; Distal spinal muscular atrophy, X-linked 3; Distichiasis-lymphedema syndrome; Dominant dystrophic epidermolysis bullosa with absence of skin; Dominant hereditary optic atrophy; Donnai Barrow syndrome; Dopamine beta hydroxylase deficiency; Dopamine receptor d2, reduced brain density of; Dowling-degos disease 4; Doyne honeycomb retinal dystrophy; Malattia leventinese; Duane syndrome type 2; Dubin-Johnson syndrome; Duchenne muscular dystrophy; Becker muscular dystrophy; Dysfibrinogenemia; Dyskeratosis congenita autosomal dominant and autosomal dominant, 3; Dyskeratosis congenita, autosomal recessive, 1, 3, 4, and 5; Dyskeratosis congenita X-linked; Dyskinesia, familial, with facial myokymia; Dysplasminogenemia; Dystonia 2 (torsion, autosomal recessive), 3 (torsion, X-linked), 5 (Dopa-responsive type), 10, 12, 16, 25, 26 (Myoclonic); Seizures, benign familial infantile, 2; Early infantile epileptic encephalopathy 2, 4, 7, 9, 10, 11, 13, and 14; Atypical Rett syndrome; Early T cell progenitor acute lymphoblastic leukemia; Ectodermal dysplasia skin fragility syndrome; Ectodermal dysplasia-syndactyly syndrome 1; Ectopia lentis, isolated autosomal recessive and dominant; Ectrodactyly, ectodermal dysplasia, and cleft lip/palate syndrome 3; Ehlers-Danlos syndrome type 7 (autosomal recessive), classic type, type 2 (progeroid), hydroxylysine-deficient, type 4, type 4 variant, and due to tenascin-X deficiency; Eichsfeld type congenital muscular dystrophy; Endocrine-cerebroosteodysplasia; Enhanced s-cone syndrome; Enlarged vestibular aqueduct syndrome; Enterokinase deficiency; Epidermodysplasia verruciformis; Epidermolysa bullosa simplex and limb girdle muscular dystrophy, simplex with mottled pigmentation, simplex with pyloric atresia, simplex, autosomal recessive, and with pyloric atresia; Epidermolytic palmoplantar keratoderma; Familial febrile seizures 8; Epilepsy, childhood absence 2, 12 (idiopathic generalized, susceptibility to) 5 (nocturnal frontal lobe), nocturnal frontal lobe type 1, partial, with variable foci, progressive myoclonic 3, and X-linked, with variable learning disabilities and behavior disorders; Epileptic encephalopathy, childhood-onset, early infantile, 1, 19, 23, 25, 30, and 32; Epiphyseal dysplasia, multiple, with myopia and conductive deafness; Episodic ataxia type 2; Episodic pain syndrome, familial, 3; Epstein syndrome; Fechtner syndrome; Erythropoietic protoporphyria; Estrogen resistance; Exudative vitreoretinopathy 6; Fabry disease and Fabry disease, cardiac variant; Factor H, VII, X, v and factor viii, combined deficiency of 2, xiii, a subunit, deficiency; Familial adenomatous polyposis 1 and 3; Familial amyloid nephropathy with urticaria and deafness; Familial cold urticarial; Familial aplasia of the vermis; Familial benign pemphigus; Familial cancer of breast; Breast cancer, susceptibility to; Osteosarcoma; Pancreatic cancer 3; Familial cardiomyopathy; Familial cold autoinflammatory syndrome 2; Familial colorectal cancer; Familial exudative vitreoretinopathy, X-linked; Familial hemiplegic migraine types 1 and 2; Familial hypercholesterolemia; Familial hypertrophic cardiomyopathy 1, 2, 3, 4, 7, 10, 23 and 24; Familial hypokalemia-hypomagnesemia; Familial hypoplastic, glomerulocystic kidney; Familial infantile myasthenia; Familial juvenile gout; Familial Mediterranean fever and Familial mediterranean fever, autosomal dominant; Familial porencephaly; Familial porphyria cutanea tarda; Familial pulmonary capillary hemangiomatosis; Familial renal glucosuria; Familial renal hypouricemia; Familial restrictive cardiomyopathy 1; Familial type 1 and 3 hyperlipoproteinemia; Fanconi anemia, complementation group E, I, N, and O; Fanconi-Bickel syndrome; Favism, susceptibility to; Febrile seizures, familial, 11; Feingold syndrome 1; Fetal hemoglobin quantitative trait locus 1; FG syndrome and FG syndrome 4; Fibrosis of extraocular muscles, congenital, 1, 2, 3a (with or without extraocular involvement), 3b; Fish-eye disease; Fleck corneal dystrophy; Floating-Harbor syndrome; Focal epilepsy with speech disorder with or without mental retardation; Focal segmental glomerulosclerosis 5; Forebrain defects; Frank Ter Haar syndrome; Borrone Di Rocco Crovato syndrome; Frasier syndrome; Wilms tumor 1; Freeman-Sheldon syndrome; Frontometaphyseal dysplasia land 3; Frontotemporal dementia; Frontotemporal dementia and/or amyotrophic lateral sclerosis 3 and 4; Frontotemporal Dementia Chromosome 3-Linked and Frontotemporal dementia ubiquitin-positive; Fructose-biphosphatase deficiency; Fuhrmann syndrome; Gamma-aminobutyric acid transaminase deficiency; Gamstorp-Wohlfart syndrome; Gaucher disease type 1 and Subacute neuronopathic; Gaze palsy, familial horizontal, with progressive scoliosis; Generalized dominant dystrophic epidermolysis bullosa; Generalized epilepsy with febrile seizures plus 3, type 1, type 2; Epileptic encephalopathy Lennox-Gastaut type; Giant axonal neuropathy; Glanzmann thrombasthenia; Glaucoma 1, open angle, e, F, and G; Glaucoma 3, primary congenital, d; Glaucoma, congenital and Glaucoma, congenital, Coloboma; Glaucoma, primary open angle, juvenile-onset; Glioma susceptibility 1; Glucose transporter type 1 deficiency syndrome; Glucose-6-phosphate transport defect; GLUT1 deficiency syndrome 2; Epilepsy, idiopathic generalized, susceptibility to, 12; Glutamate formiminotransferase deficiency; Glutaric acidemia IIA and IIB; Glutaric aciduria, type 1; Gluthathione synthetase deficiency; Glycogen storage disease 0 (muscle), II (adult form), IXa2, IXc, type 1A; type II, type IV, IV (combined hepatic and myopathic), type V, and type VI; Goldmann-Favre syndrome; Gordon syndrome; Gorlin syndrome; Holoprosencephaly sequence; Holoprosencephaly 7; Granulomatous disease, chronic, X-linked, variant; Granulosa cell tumor of the ovary; Gray platelet syndrome; Griscelli syndrome type 3; Groenouw corneal dystrophy type I; Growth and mental retardation, mandibulofacial dysostosis, microcephaly, and cleft palate; Growth hormone deficiency with pituitary anomalies; Growth hormone insensitivity with immunodeficiency; GTP cyclohydrolase I deficiency; Hajdu-Cheney syndrome; Hand foot uterus syndrome; Hearing impairment; Hemangioma, capillary infantile; Hematologic neoplasm; Hemochromatosis type 1, 2B, and 3; Microvascular complications of diabetes 7; Transferrin serum level quantitative trait locus 2; Hemoglobin H disease, nondeletional; Hemolytic anemia, nonspherocytic, due to glucose phosphate isomerase deficiency; Hemophagocytic lymphohistiocytosis, familial, 2; Hemophagocytic lymphohistiocytosis, familial, 3; Heparin cofactor II deficiency; Hereditary acrodermatitis enteropathica; Hereditary breast and ovarian cancer syndrome; Ataxia-telangiectasia-like disorder; Hereditary diffuse gastric cancer; Hereditary diffuse leukoencephalopathy with spheroids; Hereditary factors II, IX, VIII deficiency disease; Hereditary hemorrhagic telangiectasia type 2; Hereditary insensitivity to pain with anhidrosis; Hereditary lymphedema type I; Hereditary motor and sensory neuropathy with optic atrophy; Hereditary myopathy with early respiratory failure; Hereditary neuralgic amyotrophy; Hereditary Nonpolyposis Colorectal Neoplasms; Lynch syndrome I and II; Hereditary pancreatitis; Pancreatitis, chronic, susceptibility to; Hereditary sensory and autonomic neuropathy type IIB amd IIA; Hereditary sideroblastic anemia; Hermansky-Pudlak syndrome 1, 3, 4, and 6; Heterotaxy, visceral, 2, 4, and 6, autosomal; Heterotaxy, visceral, X-linked; Heterotopia; Histiocytic medullary reticulosis; Histiocytosis-lymphadenopathy plus syndrome; Holocarboxylase synthetase deficiency; Holoprosencephaly 2, 3, 7, and 9; Holt-Oram syndrome; Homocysteinemia due to MTHFR deficiency, CBS deficiency, and Homocystinuria, pyridoxine-responsive; Homocystinuria-Megaloblastic anemia due to defect in cobalamin metabolism, cblE complementation type; Howel-Evans syndrome; Hurler syndrome; Hutchinson-Gilford syndrome; Hydrocephalus; Hyperammonemia, type III; Hypercholesterolaemia and Hypercholesterolemia, autosomal recessive; Hyperekplexia 2 and Hyperekplexia hereditary; Hyperferritinemia cataract syndrome; Hyperglycinuria; Hyperimmunoglobulin D with periodic fever; Mevalonic aciduria; Hyperimmunoglobulin E syndrome; Hyperinsulinemic hypoglycemia familial 3, 4, and 5; Hyperinsulinism-hyperammonemia syndrome; Hyperlysinemia; Hypermanganesemia with dystonia, polycythemia and cirrhosis; Hyperornithinemia-hyperammonemia-homocitrullinuria syndrome; Hyperparathyroidism 1 and 2; Hyperparathyroidism, neonatal severe; Hyperphenylalaninemia, bh4-deficient, a, due to partial pts deficiency, BH4-deficient, D, and non-pku; Hyperphosphatasia with mental retardation syndrome 2, 3, and 4; Hypertrichotic osteochondrodysplasia; Hypobetalipoproteinemia, familial, associated with apob32; Hypocalcemia, autosomal dominant 1; Hypocalciuric hypercalcemia, familial, types 1 and 3; Hypochondrogenesis; Hypochromic microcytic anemia with iron overload; Hypoglycemia with deficiency of glycogen synthetase in the liver; Hypogonadotropic hypogonadism 11 with or without anosmia; Hypohidrotic ectodermal dysplasia with immune deficiency; Hypohidrotic X-linked ectodermal dysplasia; Hypokalemic periodic paralysis 1 and 2; Hypomagnesemia 1, intestinal; Hypomagnesemia, seizures, and mental retardation; Hypomyelinating leukodystrophy 7; Hypoplastic left heart syndrome; Atrioventricular septal defect and common atrioventricular junction; Hypospadias 1 and 2, X-linked; Hypothyroidism, congenital, nongoitrous, 1; Hypotrichosis 8 and 12; Hypotrichosis-lymphedema-telangiectasia syndrome; I blood group system; Ichthyosis bullosa of Siemens; Ichthyosis exfoliativa; Ichthyosis prematurity syndrome; Idiopathic basal ganglia calcification 5; Idiopathic fibrosing alveolitis, chronic form; Dyskeratosis congenita, autosomal dominant, 2 and 5; Idiopathic hypercalcemia of infancy; Immune dysfunction with T-cell inactivation due to calcium entry defect 2; Immunodeficiency 15, 16, 19, 30, 31C, 38, 40, 8, due to defect in cd3-zeta, with hyper IgM type 1 and 2, and X-Linked, with magnesium defect, Epstein-Barr virus infection, and neoplasia; Immunodeficiency-centromeric instability-facial anomalies syndrome 2; Inclusion body myopathy 2 and 3; Nonaka myopathy; Infantile convulsions and paroxysmal choreoathetosis, familial; Infantile cortical hyperostosis; Infantile GM1 gangliosidosis; Infantile hypophosphatasia; Infantile nephronophthisis; Infantile nystagmus, X-linked; Infantile Parkinsonism-dystonia; Infertility associated with multi-tailed spermatozoa and excessive DNA; Insulin resistance; Insulin-resistant diabetes mellitus and acanthosis nigricans; Insulin-dependent diabetes mellitus secretory diarrhea syndrome; Interstitial nephritis, karyomegalic; Intrauterine growth retardation, metaphyseal dysplasia, adrenal hypoplasia congenita, and genital anomalies; Iodotyrosyl coupling defect; IRAK4 deficiency; Iridogoniodysgenesis dominant type and type 1; Iron accumulation in brain; Ischiopatellar dysplasia; Islet cell hyperplasia; Isolated 17,20-lyase deficiency; Isolated lutropin deficiency; Isovaleryl-CoA dehydrogenase deficiency; Jankovic Rivera syndrome; Jervell and Lange-Nielsen syndrome 2; Joubert syndrome 1, 6, 7, 9/15 (digenic), 14, 16, and 17, and Orofaciodigital syndrome xiv; Junctional epidermolysis bullosa gravis of Herlitz; Juvenile GM>1<gangliosidosis; Juvenile polyposis syndrome; Juvenile polyposis/hereditary hemorrhagic telangiectasia syndrome; Juvenile retinoschisis; Kabuki make-up syndrome; Kallmann syndrome 1, 2, and 6; Delayed puberty; Kanzaki disease; Karak syndrome; Kartagener syndrome; Kenny-Caffey syndrome type 2; Keppen-Lubinsky syndrome; Keratoconus 1; Keratosis follicularis; Keratosis palmoplantaris striata 1; Kindler syndrome; L-2-hydroxyglutaric aciduria; Larsen syndrome, dominant type; Lattice corneal dystrophy Type III; Leber amaurosis; Zellweger syndrome; Peroxisome biogenesis disorders; Zellweger syndrome spectrum; Leber congenital amaurosis 11, 12, 13, 16, 4, 7, and 9; Leber optic atrophy; Aminoglycoside-induced deafness; Deafness, nonsyndromic sensorineural, mitochondrial; Left ventricular noncompaction 5; Left-right axis malformations; Leigh disease; Mitochondrial short-chain Enoyl-CoA Hydratase 1 deficiency; Leigh syndrome due to mitochondrial complex I deficiency; Leiner disease; Leri Weill dyschondrosteosis; Lethal congenital contracture syndrome 6; Leukocyte adhesion deficiency type I and III; Leukodystrophy, Hypomyelinating, 11 and 6; Leukoencephalopathy with ataxia, with Brainstem and Spinal Cord Involvement and Lactate Elevation, with vanishing white matter, and progressive, with ovarian failure; Leukonychia totalis; Lewy body dementia; Lichtenstein-Knorr Syndrome; Li-Fraumeni syndrome 1; Lig4 syndrome; Limb-girdle muscular dystrophy, type 1B, 2A, 2B, 2D, C1, C5, C9, C14; Congenital muscular dystrophy-dystroglycanopathy with brain and eye anomalies, type A14 and B14; Lipase deficiency combined; Lipid proteinosis; Lipodystrophy, familial partial, type 2 and 3; Lissencephaly 1, 2 (X-linked), 3, 6 (with microcephaly), X-linked; Subcortical laminar heterotopia, X-linked; Liver failure acute infantile; Loeys-Dietz syndrome 1, 2, 3; Long QT syndrome 1, 2, 2/9, 2/5, (digenic), 3, 5 and 5, acquired, susceptibility to; Lung cancer; Lymphedema, hereditary, id; Lymphedema, primary, with myelodysplasia; Lymphoproliferative syndrome 1, 1 (X-linked), and 2; Lysosomal acid lipase deficiency; Macrocephaly, macrosomia, facial dysmorphism syndrome; Macular dystrophy, vitelliform, adult-onset; Malignant hyperthermia susceptibility type 1; Malignant lymphoma, non-Hodgkin; Malignant melanoma; Malignant tumor of prostate; Mandibuloacral dysostosis; Mandibuloacral dysplasia with type A or B lipodystrophy, atypical; Mandibulofacial dysostosis, Treacher Collins type, autosomal recessive; Mannose-binding protein deficiency; Maple syrup urine disease type 1A and type 3; Marden Walker like syndrome; Marfan syndrome; Marinesco-Sj\xc3\xb6gren syndrome; Martsolf syndrome; Maturity-onset diabetes of the young, type 1, type 2, type 11, type 3, and type 9; May-Hegglin anomaly; MYH9 related disorders; Sebastian syndrome; McCune-Albright syndrome; Somatotroph adenoma; Sex cord-stromal tumor; Cushing syndrome; McKusick Kaufman syndrome; McLeod neuroacanthocytosis syndrome; Meckel-Gruber syndrome; Medium-chain acyl-coenzyme A dehydrogenase deficiency; Medulloblastoma; Megalencephalic leukoencephalopathy with subcortical cysts land 2a; Megalencephaly cutis marmorata telangiectatica congenital; PIK3CA Related Overgrowth Spectrum; Megalencephaly-polymicrogyria-polydactyly-hydrocephalus syndrome 2; Megaloblastic anemia, thiamine-responsive, with diabetes mellitus and sensorineural deafness; Meier-Gorlin syndromes land 4; Melnick-Needles syndrome; Meningioma; Mental retardation, X-linked, 3, 21, 30, and 72; Mental retardation and microcephaly with pontine and cerebellar hypoplasia; Mental retardation X-linked syndromic 5; Mental retardation, anterior maxillary protrusion, and strabismus; Mental retardation, autosomal dominant 12, 13, 15, 24, 3, 30, 4, 5, 6, and 9; Mental retardation, autosomal recessive 15, 44, 46, and 5; Mental retardation, stereotypic movements, epilepsy, and/or cerebral malformations; Mental retardation, syndromic, Claes-Jensen type, X-linked; Mental retardation, X-linked, nonspecific, syndromic, Hedera type, and syndromic, wu type; Merosin deficient congenital muscular dystrophy; Metachromatic leukodystrophy juvenile, late infantile, and adult types; Metachromatic leukodystrophy; Metatrophic dysplasia; Methemoglobinemia types I and 2; Methionine adenosyltransferase deficiency, autosomal dominant; Methylmalonic acidemia with homocystinuria, Methylmalonic aciduria cblB type, Methylmalonic aciduria due to methylmalonyl-CoA mutase deficiency; METHYLMALONIC ACIDURIA, mut(0) TYPE; Microcephalic osteodysplastic primordial dwarfism type 2; Microcephaly with or without chorioretinopathy, lymphedema, or mental retardation; Microcephaly, hiatal hernia and nephrotic syndrome; Microcephaly; Hypoplasia of the corpus callosum; Spastic paraplegia 50, autosomal recessive; Global developmental delay; CNS hypomyelination; Brain atrophy; Microcephaly, normal intelligence and immunodeficiency; Microcephaly-capillary malformation syndrome; Microcytic anemia; Microphthalmia syndromic 5, 7, and 9; Microphthalmia, isolated 3, 5, 6, 8, and with coloboma 6; Microspherophakia; Migraine, familial basilar; Miller syndrome; Minicore myopathy with external ophthalmoplegia; Myopathy, congenital with cores; Mitchell-Riley syndrome; mitochondrial 3-hydroxy-3-methylglutaryl-CoA synthase deficiency; Mitochondrial complex I, II, III, III (nuclear type 2, 4, or 8) deficiency; Mitochondrial DNA depletion syndrome 11, 12 (cardiomyopathic type), 2, 4B (MNGIE type), 8B (MNGIE type); Mitochondrial DNA-depletion syndrome 3 and 7, hepatocerebral types, and 13 (encephalomyopathic type); Mitochondrial phosphate carrier and pyruvate carrier deficiency; Mitochondrial trifunctional protein deficiency; Long-chain 3-hydroxyacyl-CoA dehydrogenase deficiency; Miyoshi muscular dystrophy 1; Myopathy, distal, with anterior tibial onset; Mohr-Tranebjaerg syndrome; Molybdenum cofactor deficiency, complementation group A; Mowat-Wilson syndrome; Mucolipidosis III Gamma; Mucopolysaccharidosis type VI, type VI (severe), and type VII; Mucopolysaccharidosis, MPS-I-H/S, MPS-II, MPS-III-A, MPS-III-B, MPS-III-C, MPS-IV-A, MPS-IV-B; Retinitis Pigmentosa 73; Gangliosidosis GM1 type 1 (with cardiac involvement) 3; Multicentric osteolysis nephropathy; Multicentric osteolysis, nodulosis and arthropathy; Multiple congenital anomalies; Atrial septal defect 2; Multiple congenital anomalies-hypotonia-seizures syndrome 3; Multiple Cutaneous and Mucosal Venous Malformations; Multiple endocrine neoplasia, types land 4; Multiple epiphyseal dysplasia 5 or Dominant; Multiple gastrointestinal atresias; Multiple pterygium syndrome Escobar type; Multiple sulfatase deficiency; Multiple synostoses syndrome 3; Muscle AMP guanine oxidase deficiency; Muscle eye brain disease; Muscular dystrophy, congenital, megaconial type; Myasthenia, familial infantile, 1; Myasthenic Syndrome, Congenital, 11, associated with acetylcholine receptor deficiency; Myasthenic Syndrome, Congenital, 17, 2A (slow-channel), 4B (fast-channel), and without tubular aggregates; Myeloperoxidase deficiency; MYH-associated polyposis; Endometrial carcinoma; Myocardial infarction 1; Myoclonic dystonia; Myoclonic-Atonic Epilepsy; Myoclonus with epilepsy with ragged red fibers; Myofibrillar myopathy 1 and ZASP-related; Myoglobinuria, acute recurrent, autosomal recessive; Myoneural gastrointestinal encephalopathy syndrome; Cerebellar ataxia infantile with progressive external ophthalmoplegia; Mitochondrial DNA depletion syndrome 4B, MNGIE type; Myopathy, centronuclear, 1, congenital, with excess of muscle spindles, distal, 1, lactic acidosis, and sideroblastic anemia 1, mitochondrial progressive with congenital cataract, hearing loss, and developmental delay, and tubular aggregate, 2; Myopia 6; Myosclerosis, autosomal recessive; Myotonia congenital; Congenital myotonia, autosomal dominant and recessive forms; Nail-patella syndrome; Nance-Horan syndrome; Nanophthalmos 2; Navajo neurohepatopathy; Nemaline myopathy 3 and 9; Neonatal hypotonia; Intellectual disability; Seizures; Delayed speech and language development; Mental retardation, autosomal dominant 31; Neonatal intrahepatic cholestasis caused by citrin deficiency; Nephrogenic diabetes insipidus, Nephrogenic diabetes insipidus, X-linked; Nephrolithiasis/osteoporosis, hypophosphatemic, 2; Nephronophthisis 13, 15 and 4; Infertility; Cerebello-oculo-renal syndrome (nephronophthisis, oculomotor apraxia and cerebellar abnormalities); Nephrotic syndrome, type 3, type 5, with or without ocular abnormalities, type 7, and type 9; Nestor-Guillermo progeria syndrome; Neu-Laxova syndrome 1; Neurodegeneration with brain iron accumulation 4 and 6; Neuroferritinopathy; Neurofibromatosis, type land type 2; Neurofibrosarcoma; Neurohypophyseal diabetes insipidus; Neuropathy, Hereditary Sensory, Type IC; Neutral 1 amino acid transport defect; Neutral lipid storage disease with myopathy; Neutrophil immunodeficiency syndrome; Nicolaides-Baraitser syndrome; Niemann-Pick disease type C1, C2, type A, and type C1, adult form; Non-ketotic hyperglycinemia; Noonan syndrome 1 and 4, LEOPARD syndrome 1; Noonan syndrome-like disorder with or without juvenile myelomonocytic leukemia; Normokalemic periodic paralysis, potassium-sensitive; Norum disease; Epilepsy, Hearing Loss, And Mental Retardation Syndrome; Mental Retardation, X-Linked 102 and syndromic 13; Obesity; Ocular albinism, type I; Oculocutaneous albinism type 1B, type 3, and type 4; Oculodentodigital dysplasia; Odontohypophosphatasia; Odontotrichomelic syndrome; Oguchi disease; Oligodontia-colorectal cancer syndrome; Opitz G/BBB syndrome; Optic atrophy 9; Oral-facial-digital syndrome; Ornithine aminotransferase deficiency; Orofacial cleft 11 and 7, Cleft lip/palate-ectodermal dysplasia syndrome; Orstavik Lindemann Solberg syndrome; Osteoarthritis with mild chondrodysplasia; Osteochondritis dissecans; Osteogenesis imperfecta type 12, type 5, type 7, type 8, type I, type III, with normal sclerae, dominant form, recessive perinatal lethal; Osteopathia striata with cranial sclerosis; Osteopetrosis autosomal dominant type 1 and 2, recessive 4, recessive 1, recessive 6; Osteoporosis with pseudoglioma; Oto-palato-digital syndrome, types I and II; Ovarian dysgenesis 1; Ovarioleukodystrophy; Pachyonychia congenita 4 and type 2; Paget disease of bone, familial; Pallister-Hall syndrome; Palmoplantar keratoderma, nonepidermolytic, focal or diffuse; Pancreatic agenesis and congenital heart disease; Papillon-Lef\xc3\xa8vre syndrome; Paragangliomas 3; Paramyotonia congenita of von Eulenburg; Parathyroid carcinoma; Parkinson disease 14, 15, 19 (juvenile-onset), 2, 20 (early-onset), 6, (autosomal recessive early-onset, and 9; Partial albinism; Partial hypoxanthine-guanine phosphoribosyltransferase deficiency; Patterned dystrophy of retinal pigment epithelium; PC-K6a; Pelizaeus-Merzbacher disease; Pendred syndrome; Peripheral demyelinating neuropathy, central dysmyelination; Hirschsprung disease; Permanent neonatal diabetes mellitus; Diabetes mellitus, permanent neonatal, with neurologic features; Neonatal insulin-dependent diabetes mellitus; Maturity-onset diabetes of the young, type 2; Peroxisome biogenesis disorder 14B, 2A, 4A, 5B, 6A, 7A, and 7B; Perrault syndrome 4; Perry syndrome; Persistent hyperinsulinemic hypoglycemia of infancy; familial hyperinsulinism; Phenotypes; Phenylketonuria; Pheochromocytoma; Hereditary Paraganglioma-Pheochromocytoma Syndromes; Paragangliomas 1; Carcinoid tumor of intestine; Cowden syndrome 3; Phosphoglycerate dehydrogenase deficiency; Phosphoglycerate kinase 1 deficiency; Photosensitive trichothiodystrophy; Phytanic acid storage disease; Pick disease; Pierson syndrome; Pigmentary retinal dystrophy; Pigmented nodular adrenocortical disease, primary, 1; Pilomatrixoma; Pitt-Hopkins syndrome; Pituitary dependent hypercortisolism; Pituitary hormone deficiency, combined 1, 2, 3, and 4; Plasminogen activator inhibitor type 1 deficiency; Plasminogen deficiency, type I; Platelet-type bleeding disorder 15 and 8; Poikiloderma, hereditary fibrosing, with tendon contractures, myopathy, and pulmonary fibrosis; Polycystic kidney disease 2, adult type, and infantile type; Polycystic lipomembranous osteodysplasia with sclerosing leukoencephalopathy; Polyglucosan body myopathy 1 with or without immunodeficiency; Polymicrogyria, asymmetric, bilateral frontoparietal; Polyneuropathy, hearing loss, ataxia, retinitis pigmentosa, and cataract; Pontocerebellar hypoplasia type 4; Popliteal pterygium syndrome; Porencephaly 2; Porokeratosis 8, disseminated superficial actinic type; Porphobilinogen synthase deficiency; Porphyria cutanea tarda; Posterior column ataxia with retinitis pigmentosa; Posterior polar cataract type 2; Prader-Willi-like syndrome; Premature ovarian failure 4, 5, 7, and 9; Primary autosomal recessive microcephaly 10, 2, 3, and 5; Primary ciliary dyskinesia 24; Primary dilated cardiomyopathy; Left ventricular noncompaction 6; 4, Left ventricular noncompaction 10; Paroxysmal atrial fibrillation; Primary hyperoxaluria, type I, type, and type III; Primary hypertrophic osteoarthropathy, autosomal recessive 2; Primary hypomagnesemia; Primary open angle glaucoma juvenile onset 1; Primary pulmonary hypertension; Primrose syndrome; Progressive familial heart block type 1B; Progressive familial intrahepatic cholestasis 2 and 3; Progressive intrahepatic cholestasis; Progressive myoclonus epilepsy with ataxia; Progressive pseudorheumatoid dysplasia; Progressive sclerosing poliodystrophy; Prolidase deficiency; Proline dehydrogenase deficiency; Schizophrenia 4; Properdin deficiency, X-linked; Propionic academia; Proprotein convertase 1/3 deficiency; Prostate cancer, hereditary, 2; Protan defect; Proteinuria; Finnish congenital nephrotic syndrome; Proteus syndrome; Breast adenocarcinoma; Pseudoachondroplastic spondyloepiphyseal dysplasia syndrome; Pseudohypoaldosteronism type 1 autosomal dominant and recessive and type 2; Pseudohypoparathyroidism type 1A, Pseudopseudohypoparathyroidism; Pseudoneonatal adrenoleukodystrophy; Pseudoprimary hyperaldosteronism; Pseudoxanthoma elasticum; Generalized arterial calcification of infancy 2; Pseudoxanthoma elasticum-like disorder with multiple coagulation factor deficiency; Psoriasis susceptibility 2; PTEN hamartoma tumor syndrome; Pulmonary arterial hypertension related to hereditary hemorrhagic telangiectasia; Pulmonary Fibrosis And/Or Bone Marrow Failure, Telomere-Related, 1 and 3; Pulmonary hypertension, primary, 1, with hereditary hemorrhagic telangiectasia; Purine-nucleoside phosphorylase deficiency; Pyruvate carboxylase deficiency; Pyruvate dehydrogenase E1-alpha deficiency; Pyruvate kinase deficiency of red cells; Raine syndrome; Rasopathy; Recessive dystrophic epidermolysis bullosa; Nail disorder, nonsyndromic congenital, 8; Reifenstein syndrome; Renal adysplasia; Renal carnitine transport defect; Renal coloboma syndrome; Renal dysplasia; Renal dysplasia, retinal pigmentary dystrophy, cerebellar ataxia and skeletal dysplasia; Renal tubular acidosis, distal, autosomal recessive, with late-onset sensorineural hearing loss, or with hemolytic anemia; Renal tubular acidosis, proximal, with ocular abnormalities and mental retardation; Retinal cone dystrophy 3B; Retinitis pigmentosa; Retinitis pigmentosa 10, 11, 12, 14, 15, 17, and 19; Retinitis pigmentosa 2, 20, 25, 35, 36, 38, 39, 4, 40, 43, 45, 48, 66, 7, 70, 72; Retinoblastoma; Rett disorder; Rhabdoid tumor predisposition syndrome 2; Rhegmatogenous retinal detachment, autosomal dominant; Rhizomelic chondrodysplasia punctata type 2 and type 3; Roberts-SC phocomelia syndrome; Robinow Sorauf syndrome; Robinow syndrome, autosomal recessive, autosomal recessive, with brachy-syn-polydactyly; Rothmund-Thomson syndrome; Rapadilino syndrome; RRM2B-related mitochondrial disease; Rubinstein-Taybi syndrome; Salla disease; Sandhoff disease, adult and infantil types; Sarcoidosis, early-onset; Blau syndrome; Schindler disease, type 1; Schizencephaly; Schizophrenia 15; Schneckenbecken dysplasia; Schwannomatosis 2; Schwartz Jampel syndrome type 1; Sclerocornea, autosomal recessive; Sclerosteosis; Secondary hypothyroidism; Segawa syndrome, autosomal recessive; Senior-Loken syndrome 4 and 5, Sensory ataxic neuropathy, dysarthria, and ophthalmoparesis; Sepiapterin reductase deficiency; SeSAME syndrome; Severe combined immunodeficiency due to ADA deficiency, with microcephaly, growth retardation, and sensitivity to ionizing radiation, atypical, autosomal recessive, T cell-negative, B cell-positive, NK cell-negative of NK-positive; Severe congenital neutropenia; Severe congenital neutropenia 3, autosomal recessive or dominant; Severe congenital neutropenia and 6, autosomal recessive; Severe myoclonic epilepsy in infancy; Generalized epilepsy with febrile seizures plus, types 1 and 2; Severe X-linked myotubular myopathy; Short QT syndrome 3; Short stature with nonspecific skeletal abnormalities; Short stature, auditory canal atresia, mandibular hypoplasia, skeletal abnormalities; Short stature, onychodysplasia, facial dysmorphism, and hypotrichosis; Primordial dwarfism; Short-rib thoracic dysplasia 11 or 3 with or without polydactyly; Sialidosis type I and II; Silver spastic paraplegia syndrome; Slowed nerve conduction velocity, autosomal dominant; Smith-Lemli-Opitz syndrome; Snyder Robinson syndrome; Somatotroph adenoma; Prolactinoma; familial, Pituitary adenoma predisposition; Sotos syndrome 1 or 2; Spastic ataxia 5, autosomal recessive, Charlevoix-Saguenay type, 1, 10, or 11, autosomal recessive; Amyotrophic lateral sclerosis type 5; Spastic paraplegia 15, 2, 3, 35, 39, 4, autosomal dominant, 55, autosomal recessive, and 5A; Bile acid synthesis defect, congenital, 3; Spermatogenic failure 11, 3, and 8; Spherocytosis types 4 and 5; Spheroid body myopathy; Spinal muscular atrophy, lower extremity predominant 2, autosomal dominant; Spinal muscular atrophy, type II; Spinocerebellar ataxia 14, 21, 35, 40, and 6; Spinocerebellar ataxia autosomal recessive 1 and 16; Splenic hypoplasia; Spondylocarpotarsal synostosis syndrome; Spondylocheirodysplasia, Ehlers-Danlos syndrome-like, with immune dysregulation, Aggrecan type, with congenital joint dislocations, short limb-hand type, Sedaghatian type, with cone-rod dystrophy, and Kozlowski type; Parastremmatic dwarfism; Stargardt disease 1; Cone-rod dystrophy 3; Stickler syndrome type 1; Kniest dysplasia; Stickler syndrome, types 1 (nonsyndromic ocular) and 4; Sting-associated vasculopathy, infantile-onset; Stormorken syndrome; Sturge-Weber syndrome, Capillary malformations, congenital, 1; Succinyl-CoA acetoacetate transferase deficiency; Sucrase-isomaltase deficiency; Sudden infant death syndrome; Sulfite oxidase deficiency, isolated; Supravalvar aortic stenosis; Surfactant metabolism dysfunction, pulmonary, 2 and 3; Symphalangism, proximal, 1b; Syndactyly Cenani Lenz type; Syndactyly type 3; Syndromic X-linked mental retardation 16; Talipes equinovarus; Tangier disease; TARP syndrome; Tay-Sachs disease, B1 variant, Gm2-gangliosidosis (adult), Gm2-gangliosidosis (adult-onset); Temtamy syndrome; Tenorio Syndrome; Terminal osseous dysplasia; Testosterone 17-beta-dehydrogenase deficiency; Tetraamelia, autosomal recessive; Tetralogy of Fallot; Hypoplastic left heart syndrome 2; Truncus arteriosus; Malformation of the heart and great vessels; Ventricular septal defect 1; Thiel-Behnke corneal dystrophy; Thoracic aortic aneurysms and aortic dissections; Marfanoid habitus; Three M syndrome 2; Thrombocytopenia, platelet dysfunction, hemolysis, and imbalanced globin synthesis; Thrombocytopenia, X-linked; Thrombophilia, hereditary, due to protein C deficiency, autosomal dominant and recessive; Thyroid agenesis; Thyroid cancer, follicular; Thyroid hormone metabolism, abnormal; Thyroid hormone resistance, generalized, autosomal dominant; Thyrotoxic periodic paralysis and Thyrotoxic periodic paralysis 2; Thyrotropin-releasing hormone resistance, generalized; Timothy syndrome; TNF receptor-associated periodic fever syndrome (TRAPS); Tooth agenesis, selective, 3 and 4; Torsades de pointes; Townes-Brocks-branchiootorenal-like syndrome; Transient bullous dermolysis of the newborn; Treacher collins syndrome 1; Trichomegaly with mental retardation, dwarfism and pigmentary degeneration of retina; Trichorhinophalangeal dysplasia type I; Trichorhinophalangeal syndrome type 3; Trimethylaminuria; Tuberous sclerosis syndrome; Lymphangiomyomatosis; Tuberous sclerosis 1 and 2; Tyrosinase-negative oculocutaneous albinism; Tyrosinase-positive oculocutaneous albinism; Tyrosinemia type I; UDPglucose-4-epimerase deficiency; Ullrich congenital muscular dystrophy; Ulna and fibula absence of with severe limb deficiency; Upshaw-Schulman syndrome; Urocanate hydratase deficiency; Usher syndrome, types 1, 1B, 1D, 1G, 2A, 2C, and 2D; Retinitis pigmentosa 39; UV-sensitive syndrome; Van der Woude syndrome; Van Maldergem syndrome 2; Hennekam lymphangiectasia-lymphedema syndrome 2; Variegate porphyria; Ventriculomegaly with cystic kidney disease; Verheij syndrome; Very long chain acyl-CoA dehydrogenase deficiency; Vesicoureteral reflux 8; Visceral heterotaxy 5, autosomal; Visceral myopathy; Vitamin D-dependent rickets, types land 2; Vitelliform dystrophy; von Willebrand disease type 2M and type 3; Waardenburg syndrome type 1, 4C, and 2E (with neurologic involvement); Klein-Waardenberg syndrome; Walker-Warburg congenital muscular dystrophy; Warburg micro syndrome 2 and 4; Warts, hypogammaglobulinemia, infections, and myelokathexis; Weaver syndrome; Weill-Marchesani syndrome 1 and 3; Weill-Marchesani-like syndrome; Weissenbacher-Zweymuller syndrome; Werdnig-Hoffmann disease; Charcot-Marie-Tooth disease; Werner syndrome; WFS1-Related Disorders; Wiedemann-Steiner syndrome; Wilson disease; Wolfram-like syndrome, autosomal dominant; Worth disease; Van Buchem disease type 2; Xeroderma pigmentosum, complementation group b, group D, group E, and group G; X-linked agammaglobulinemia; X-linked hereditary motor and sensory neuropathy; X-linked ichthyosis with steryl-sulfatase deficiency; X-linked periventricular heterotopia; Oto-palato-digital syndrome, type I; X-linked severe combined immunodeficiency; Zimmermann-Laband syndrome and Zimmermann-Laband syndrome 2; and Zonular pulverulent cataract 3.

[1072] The target nucleotide sequence may comprise a target sequence (e.g., a point mutation) associated with a disease, disorder, or condition. The target sequence may comprise a T to C (or A to G) point mutation associated with a disease, disorder, or condition, and wherein the deamination of the mutant C base results in mismatch repair-mediated correction to a sequence that is not associated with a disease, disorder, or condition. The target sequence may comprise a G to A (or C to T) point mutation associated with a disease, disorder, or condition, and wherein the deamination of the mutant A base results in mismatch repair-mediated correction to a sequence that is not associated with a disease, disorder, or condition. The target sequence may encode a protein, and where the point mutation is in a codon and results in a change in the amino acid encoded by the mutant codon as compared to a wild-type codon. The target sequence may also be at a splice site, and the point mutation results in a change in the splicing of an mRNA transcript as compared to a wild-type transcript. In addition, the target may be at a non-coding sequence of a gene, such as a promoter, and the point mutation results in increased or decreased expression of the gene.

[1073] Thus, in some aspects, the deamination of a mutant C results in a change of the amino acid encoded by the mutant codon, which in some cases can result in the expression of a wild-type amino acid. In other aspects, the deamination of a mutant A results in a change of the amino acid encoded by the mutant codon, which in some cases can result in the expression of a wild-type amino acid.

[1074] The methods described herein involving contacting a cell with a composition or rAAV particle can occur in vitro, ex vivo, or in vivo. In certain embodiments, the step of contacting occurs in a subject. In certain embodiments, the subject has been diagnosed with a disease, disorder, or condition.

[1075] In some embodiments, the methods disclosed herein involve contacting a mammalian cell with a composition or rAAV particle. In particular embodiments, the methods involve contacting a retinal cell, cortical cell or cerebellar cell.

[1076] The split Cas9 protein or split prime editor delivered using the methods described herein preferably have comparable activity compared to the original Cas9 protein or prime editor (i.e., unsplit protein delivered to a cell or expressed in a cell as a whole). For example, the split Cas9 protein or split prime editor retains at least 50% (e.g., at least 50%, at least 60%, at least 70%, at least 80%, at least 90%, at least 95%, at least 98%, at least 99%, or 100%) of the activity of the original Cas9 protein or prime editor. In some embodiments, the split Cas9 protein or split prime editor is more active (e.g., 2-fold, 5-fold, 10-fold, 100-fold, 1000-fold, or more) than that of an original Cas9 protein or prime editor.

[1077] The compositions described herein may be administered to a subject in need thereof in a therapeutically effective amount to treat and/or prevent a disease or disorder the subject is suffering from. Any disease or disorder that maybe treated and/or prevented using CRISPR/Cas9-based genome-editing technology may be treated by the split Cas9 protein or the split prime editor described herein. It is to be understood that, if the nucleotide sequences encoding the split Cas9 protein or the prime editor does not further encode a gRNA, a separate nucleic acid vector encoding the gRNA may be administered together with the compositions described herein.

[1078] Exemplary suitable diseases, disorders or conditions include, without limitation the disease or disorder is selected from the group consisting of: cystic fibrosis, phenylketonuria, epidermolytic hyperkeratosis (EHK), chronic obstructive pulmonary disease (COPD), Charcot-Marie-Toot disease type 4J, neuroblastoma (NB), von Willebrand disease (vWD), myotonia congenital, hereditary renal amyloidosis, dilated cardiomyopathy, hereditary lymphedema, familial Alzheimer's disease, prion disease, chronic infantile neurologic cutaneous articular syndrome (CINCA), congenital deafness, Niemann-Pick disease type C (NPC) disease, and desmin-related myopathy (DRM). In particular embodiments, the disease or condition is Niemann-Pick disease type C (NPC) disease.

[1079] In some embodiments, the disease, disorder or condition is associated with a point mutation in an NPC gene, a DNMT1 gene, a PCSK9 gene, or a TMC1 gene. In certain embodiments, the point mutation is a T3182C mutation in NPC, which results in an I1061T amino acid substitution.

[1080] In certain embodiments, the point mutation is an A545G mutation in TMC1, which results in a Y182C amino acid substitution. TMC1 encodes a protein that forms mechanosensitive ion channels in sensory hair cells of the inner ear and is required for normal auditory function. The Y182C amino acid substitution is associated with congenital deafness.

[1081] In some embodiments, the disease, disorder or condition is associated with a point mutation that generates a stop codon, for example, a premature stop codon within the coding region of a gene.

[1082] Additional exemplary diseases, disorders and conditions include cystic fibrosis (see, e.g., Schwank et al., Functional repair of CFTR by CRISPR/Cas9 in intestinal stem cell organoids of cystic fibrosis patients. Cell stem cell. 2013; 13: 653-658; and Wu et. al., Correction of a genetic disease in mouse via use of CRISPR-Cas9. Cell stem cell. 2013; 13: 659-662, neither of which uses a deaminase fusion protein to correct the genetic defect); phenylketonuria—e.g., phenylalanine to serine mutation at position 835 (mouse) or 240 (human) or a homologous residue in phenylalanine hydroxylase gene (T>C mutation)—see, e.g., McDonald et al., Genomics. 1997; 39:402-405; Bernard-Soulier syndrome (BSS)—e.g., phenylalanine to serine mutation at position 55 or a homologous residue, or cysteine to arginine at residue 24 or a homologous residue in the platelet membrane glycoprotein IX (T>C mutation)—see, e.g., Noris et al., British Journal of Haematology. 1997; 97: 312-320, and Ali et al., Hematol. 2014; 93: 381-384; epidermolytic hyperkeratosis (EHK)—e.g., leucine to proline mutation at position 160 or 161 (if counting the initiator methionine) or a homologous residue in keratin 1 (T>C mutation)—see, e.g., Chipev et al., Cell. 1992; 70: 821-828, see also accession number P04264 in the UNIPROT database at www[dot]uniprot[dot]org; chronic obstructive pulmonary disease (COPD)—e.g., leucine to proline mutation at position 54 or 55 (if counting the initiator methionine) or a homologous residue in the processed form of α₁-antitrypsin or residue 78 in the unprocessed form or a homologous residue (T>C mutation)—see, e.g., Poller et al., Genomics. 1993; 17: 740-743, see also accession number P01011 in the UNIPROT database; Charcot-Marie-Toot disease type 4J—e.g., isoleucine to threonine mutation at position 41 or a homologous residue in FIG. 4 (T>C mutation)—see, e.g., Lenk et al., PLoS Genetics. 2011; 7: e1002104; neuroblastoma (NB)—e.g., leucine to proline mutation at position 197 or a homologous residue in Caspase-9 (T>C mutation)—see, e.g., Kundu et al., 3 Biotech. 2013, 3:225-234; von Willebrand disease (vWD)—e.g., cysteine to arginine mutation at position 509 or a homologous residue in the processed form of von Willebrand factor, or at position 1272 or a homologous residue in the unprocessed form of von Willebrand factor (T>C mutation)—see, e.g., Lavergne et al., Br. J. Haematol. 1992, see also accession number P04275 in the UNIPROT database; 82: 66-72; myotonia congenital—e.g., cysteine to arginine mutation at position 277 or a homologous residue in the muscle chloride channel gene CLCN1 (T>C mutation)—see, e.g., Weinberger et al., The J. of Physiology. 2012; 590: 3449-3464; hereditary renal amyloidosis—e.g., stop codon to arginine mutation at position 78 or a homologous residue in the processed form of apolipoprotein A11 or at position 101 or a homologous residue in the unprocessed form (T>C mutation)—see, e.g., Yazaki et al., Kidney Int. 2003; 64: 11-16; dilated cardiomyopathy (DCM)—e.g., tryptophan to Arginine mutation at position 148 or a homologous residue in the FOXD4 gene (T>C mutation), see, e.g., Minoretti et. al., Int. J. of Mol. Med. 2007; 19: 369-372; hereditary lymphedema—e.g., histidine to arginine mutation at position 1035 or a homologous residue in VEGFR3 tyrosine kinase (A>G mutation), see, e.g., Irrthum et al., Am. J. Hum. Genet. 2000; 67: 295-301; familial Alzheimer's disease—e.g., isoleucine to valine mutation at position 143 or a homologous residue in presenilin1 (A>G mutation), see, e.g., Gallo et. al., J. Alzheimer's disease. 2011; 25: 425-431; Prion disease—e.g., methionine to valine mutation at position 129 or a homologous residue in prion protein (A>G mutation)—see, e.g., Lewis et. al., J. of General Virology. 2006; 87: 2443-2449; chronic infantile neurologic cutaneous articular syndrome (CINCA)—e.g., Tyrosine to Cysteine mutation at position 570 or a homologous residue in cryopyrin (A>G mutation)—see, e.g., Fujisawa et. al. Blood. 2007; 109: 2903-2911; and desmin-related myopathy (DRM)—e.g., arginine to glycine mutation at position 120 or a homologous residue in αβ crystallin (A>G mutation)—see, e.g., Kumar et al., J. Biol. Chem. 1999; 274: 24137-24141. The entire contents of all references and database entries is incorporated herein by reference.

### Trinucleotide Repeat Expansion Disease

[1083] Trinucleotide repeat expansion is associated with a number of human diseases, including Huntington's Disease, Fragile X syndrome, and Friedreich's ataxia. The most common trinucleotide repeat contains CAG triplets, though GAA triplets (Friedreich's ataxia) and CGG triplets (Fragile X syndrome) also occur. Inheriting a predisposition to expansion, or acquiring an already expanded parental allele, increases the likelihood of acquiring the disease. Pathogenic expansions of trinucleotide repeats could hypothetically be corrected using prime editing.

[1084] A region upstream of the repeat region can be nicked by an RNA-guided nuclease, then used to prime synthesis of a new DNA strand that contains a healthy number of repeats (which depends on the particular gene and disease), in accordance with the general mechanism outlined in FIG. 1G or FIG. 22. After the repeat sequence, a short stretch of homology is added that matches the identity of the sequence adjacent to the other end of the repeat (red strand). Invasion of the newly synthesized strand by the TPRT system, and subsequent replacement of the endogenous DNA with the newly synthesized flap, leads to a contracted repeat allele. The term “contracted” refers to a shortening of the length of the nucleotide repeat region, thereby resulting in repairing the trinucleotide repeat region.

[1085] The prime editing system or prime editing (PE) system described herein may be used to contract trinucleotide repeat mutations (or “triplet expansion diseases”) to treating conditions such as Huntington's disease and other trinucleotide repeat disorders. Trinucleotide repeat expansion disorders are complex, progressive disorders that involve developmental neurobiology and often affect cognition as well as sensori-motor functions. The disorders show genetic anticipation (i.e. increased severity with each generation). The DNA expansions or contractions usually happen meiotically (i.e. during the time of gametogenesis, or early in embryonic development), and often have sex-bias meaning that some genes expand only when inherited through the female, others only through the male. In humans, trinucleotide repeat expansion disorders can cause gene silencing at either the transcriptional or translational level, which essentially knocks out gene function. Alternatively, trinucleotide repeat expansion disorders can cause altered proteins generated with large repetitive amino acid sequences that either abrogate or change protein function, often in a dominant-negative manner (e.g. poly-glutamine diseases).

[1086] Without wishing to be bound by theory, triplet expansion is caused by slippage during DNA replication or during DNA repair synthesis. Because the tandem repeats have identical sequence to one another, base pairing between two DNA strands can take place at multiple points along the sequence. This may lead to the formation of “loop out” structures during DNA replication or DNA repair synthesis. This may lead to repeated copying of the repeated sequence, expanding the number of repeats. Additional mechanisms involving hybrid RNA:DNA intermediates have been proposed. Prime editing may be used to reduce or eliminate these triplet expansion regions by deletion one or more or the offending repeat codon triplets. In an embodiment of this use, FIG. 23, provides a schematic of a PEgRNA design for contracting or reducing trinucleotide repeat sequences with prime editing.

[1087] Prime editing may be implemented to contract triplet expansion regions by nicking a region upstream of the triplet repeat region with the prime editor comprising a PEgRNA appropriated targeted to the cut site. The prime editor then synthesizes a new DNA strand (ssDNA flap) based on the PEgRNA as a template (i.e., the edit template thereof) that codes for a healthy number of triplet repeats (which depends on the particular gene and disease). The newly synthesized ssDNA strand comprising the healthy triplet repeat sequence also is synthesized to include a short stretch of homology (i.e., the homology arm) that matches the sequence adjacent to the other end of the repeat (red strand). Invasion of the newly synthesized strand, and subsequent replacement of the endogenous DNA with the newly synthesized ssDNA flap, leads to a contracted repeat allele.

[1088] Depending on the particular trinucleotide expansion disorder, the defect-inducing triplet expansions may occur in “trinucleotide repeat expansion proteins.” Trinucleotide repeat expansion proteins are a diverse set of proteins associated with susceptibility for developing a trinucleotide repeat expansion disorder, the presence of a trinucleotide repeat expansion disorder, the severity of a trinucleotide repeat expansion disorder or any combination thereof. Trinucleotide repeat expansion disorders are divided into two categories determined by the type of repeat. The most common repeat is the triplet CAG, which, when present in the coding region of a gene, codes for the amino acid glutamine (Q). Therefore, these disorders are referred to as the polyglutamine (polyQ) disorders and comprise the following diseases: Huntington Disease (HD); Spinobulbar Muscular Atrophy (SBMA); Spinocerebellar Ataxias (SCA types 1, 2, 3, 6, 7, and 17); and Dentatorubro-Pallidoluysian Atrophy (DRPLA). The remaining trinucleotide repeat expansion disorders either do not involve the CAG triplet or the CAG triplet is not in the coding region of the gene and are, therefore, referred to as the non-polyglutamine disorders. The non-polyglutamine disorders comprise Fragile X Syndrome (FRAXA); Fragile XE Mental Retardation (FRAXE); Friedreich Ataxia (FRDA); Myotonic Dystrophy (DM); and Spinocerebellar Ataxias (SCA types 8, and 12).

[1089] The proteins associated with trinucleotide repeat expansion disorders can be selected based on an experimental association of the protein associated with a trinucleotide repeat expansion disorder to a trinucleotide repeat expansion disorder. For example, the production rate or circulating concentration of a protein associated with a trinucleotide repeat expansion disorder may be elevated or depressed in a population having a trinucleotide repeat expansion disorder relative to a population lacking the trinucleotide repeat expansion disorder. Differences in protein levels may be assessed using proteomic techniques including but not limited to Western blot, immunohistochemical staining, enzyme linked immunosorbent assay (ELISA), and mass spectrometry. Alternatively, the proteins associated with trinucleotide repeat expansion disorders may be identified by obtaining gene expression profiles of the genes encoding the proteins using genomic techniques including but not limited to DNA microarray analysis, serial analysis of gene expression (SAGE), and quantitative real-time polymerase chain reaction (Q-PCR).

[1090] Non-limiting examples of proteins associated with trinucleotide repeat expansion disorders which can be corrected by prime editing include AR (androgen receptor), FMR1 (fragile X mental retardation 1), HTT (huntingtin), DMPK (dystrophia myotonica-protein kinase), FXN (frataxin), ATXN2 (ataxin 2), ATN1 (atrophin 1), FEN1 (flap structure-specific endonuclease 1), TNRC6A (trinucleotide repeat containing 6A), PABPN1 (poly(A) binding protein, nuclear 1), JPH3 (junctophilin 3), MED15 (mediator complex subunit 15), ATXN1 (ataxin 1), ATXN3 (ataxin 3), TBP (TATA box binding protein), CACNA1A (calcium channel, voltage-dependent, P/Q type, alpha 1A subunit), ATXN80S (ATXN8 opposite strand (non-protein coding)), PPP2R2B (protein phosphatase 2, regulatory subunit B, beta), ATXN7 (ataxin 7), TNRC6B (trinucleotide repeat containing 6B), TNRC6C (trinucleotide repeat containing 6C), CELF3 (CUGBP, Elav-like family member 3), MAB21L1 (mab-21-like 1 (C. elegans)), MSH2 (mutS homolog 2, colon cancer, nonpolyposis type 1 (E. coli)), TMEM185A (transmembrane protein 185A), SIX5 (SIX homeobox 5), CNPY3 (canopy 3 homolog (zebrafish)), FRAXE (fragile site, folic acid type, rare, fra(X)(q28) E), GNB2 (guanine nucleotide binding protein (G protein), beta polypeptide 2), RPL14 (ribosomal protein L14), ATXN8 (ataxin 8), INSR (insulin receptor), TTR (transthyretin), EP400 (E1A binding protein p400), GIGYF2 (GRB10 interacting GYF protein 2), OGG1 (8-oxoguanine DNA glycosylase), STC1 (stanniocalcin 1), CNDP1 (carnosine dipeptidase 1 (metallopeptidase M20 family)), C10orf2 (chromosome 10 open reading frame 2), MAML3 mastermind-like 3 (Drosophila), DKC1 (dyskeratosis congenita 1, dyskerin), PAXIP1 (PAX interacting (with transcription-activation domain) protein 1), CASK (calcium/calmodulin-dependent serine protein kinase (MAGUK family)), MAPT (microtubule-associated protein tau), SP1 (Sp1 transcription factor), POLG (polymerase (DNA directed), gamma), AFF2 (AF4/FMR2 family, member 2), THBS1 (thrombospondin 1), TP53 (tumor protein p53), ESR1 (estrogen receptor 1), CGGBP1 (CGG triplet repeat binding protein 1), ABT1 (activator of basal transcription 1), KLK3 (kallikrein-related peptidase 3), PRNP (prion protein), JUN (jun oncogene), KCNN3 (potassium intermediate/small conductance calcium-activated channel, subfamily N, member 3), BAX (BCL2-associated X protein), FRAXA (fragile site, folic acid type, rare, fra(X)(q27.3) A (macroorchidism, mental retardation)), KBTBD10 (kelch repeat and BTB (POZ) domain containing 10), MBNL1 (muscleblind-like (Drosophila)), RAD51 (RAD51 homolog (RecA homolog, E. coli) (S. cerevisiae)), NCOA3 (nuclear receptor coactivator 3), ERDA1 (expanded repeat domain, CAG/CTG 1), TSC1 (tuberous sclerosis 1), COMP (cartilage oligomeric matrix protein), GCLC (glutamate-cysteine ligase, catalytic subunit), RRAD (Ras-related associated with diabetes), MSH3 (mutS homolog 3 (E. coli)), DRD2 (dopamine receptor D2), CD44 (CD44 molecule (Indian blood group)), CTCF (CCCTC-binding factor (zinc finger protein)), CCND1 (cyclin D1), CLSPN (claspin homolog (Xenopus laevis)), MEF2A (myocyte enhancer factor 2A), PTPRU (protein tyrosine phosphatase, receptor type, U), GAPDH (glyceraldehyde-3-phosphate dehydrogenase), TRIM22 (tripartite motif-containing 22), WT1 (Wilms tumor 1), AHR (aryl hydrocarbon receptor), GPX1 (glutathione peroxidase 1), TPMT (thiopurine S-methyltransferase), NDP (Norrie disease (pseudoglioma)), ARX (aristaless related homeobox), MUS81 (MUS81 endonuclease homolog (S. cerevisiae)), TYR (tyrosinase (oculocutaneous albinism IA)), EGR1 (early growth response 1), UNG (uracil-DNA glycosylase), NUMBL (numb homolog (Drosophila)-like), FABP2 (fatty acid binding protein 2, intestinal), EN2 (engrailed homeobox 2), CRYGC (crystallin, gamma C), SRP14 (signal recognition particle 14 kDa (homologous Alu RNA binding protein)), CRYGB (crystallin, gamma B), PDCD1 (programmed cell death 1), HOXA1 (homeobox A1), ATXN2L (ataxin 2-like), PMS2 (PMS2 postmeiotic segregation increased 2 (S. cerevisiae)), GLA (galactosidase, alpha), CBL (Cas-Br-M (murine) ecotropic retroviral transforming sequence), FTH1 (ferritin, heavy polypeptide 1), IL12RB2 (interleukin 12 receptor, beta 2), OTX2 (orthodenticle homeobox 2), HOXA5 (homeobox A5), POLG2 (polymerase (DNA directed), gamma 2, accessory subunit), DLX2 (distal-less homeobox 2), SIRPA (signal-regulatory protein alpha), OTX1 (orthodenticle homeobox 1), AHRR (aryl-hydrocarbon receptor repressor), MANF (mesencephalic astrocyte-derived neurotrophic factor), TMEM158 (transmembrane protein 158 (gene/pseudogene)), and ENSG00000078687.

[1091] In a particular aspect, the instant disclosure provides TPRT-based methods for the treatment of a subject diagnosed with an expansion repeat disorder (also known as a repeat expansion disorder or a trinucleotide repeat disorder). Expansion repeat disorders occur when microsatellite repeats expand beyond a threshold length. Currently, at least 30 genetic diseases are believed to be caused by repeat expansions. Scientific understanding of this diverse group of disorders came to lights in the early 1990's with the discovery that trinucleotide repeats underlie several major inherited conditions, including Fragile X, Spinal and Bulbar Muscular Atrophy, Myotonic Dystrophy, and Huntington's disease (Nelson et al, “The unstable repeats—three evolving faces of neurological disease,” Neuron, Mar. 6, 2013, Vol. 77; 825-843, which is incorporated herein by reference), as well as Haw River Syndrome, Jacobsen Syndrome, Dentatorubral-pallidoluysian atrophy (DRPLA), Machado-Joseph disease, Synpolydactyly (SPD II), Hand-foot genital syndrome (HFGS), Cleidocranial dysplasia (CCD), Holoprosencephaly disorder (HPE), Congenital central hypventilation syndrome (CCHS), ARX-nonsyndromic X-linked mental retardation (XLMR), and Oculopharyngeal muscular dystrophy (OPMD) (see. Microsatellite repeat instability was found to be a hallmark of these conditions, as was anticipation—the phenomenon in which repeat expansion can occur with each successive generation, which leads to a more severe phenotype and earlier age of onset in the offspring. Repeat expansions are believed to cause diseases via several different mechanisms. Namely, expansions may interfere with cellular functioning at the level of the gene, the mRNA transcript, and/or the encoded protein. In some conditions, mutations act via a loss-of-function mechanism by silencing repeat-containing genes. In others, disease results from gain-of-function mechanisms, whereby either the mRNA transcript or protein takes on new, aberrant functions.

[1092] In one embodiment, a method of treating a trinucleotide repeat disorder is depicted in FIG. 23. In general, the approach involves using TPRT genome editing (i.e., prime editing) in combination with an extended gRNA that comprises a region that encodes a desired and healthy replacement trinucleotide repeat sequence that is intended to replace the endogenous diseased trinucleotide repeat sequence through the mechanism of the prime editing process. A schematic of an exemplary gRNA design for contracting trinucleotide repeat sequences and trinucleotide repeat contraction with TPRT genome editing (i.e., prime editing) is shown in FIG. 23.

### Prion Disease

[1093] Prime editing can also be used to prevent or halt the progression of prion disease through the installation of one or more protective mutations into prion proteins (PRNP) which become misfolded during the course of disease. Prion diseases or transmissible spongiform encephalopathies (TSEs) are a family of rare progressive neurodegenerative disorders that affect both humans and animals. They are distinguished by long incubation periods, characteristic spongiform changes associated with neuronal loss, and a failure to induce inflammatory response.

[1094] In humans, prion disease includes Creutzfeldt-Jakob Disease (CJD), Variant Creutzfeldt-Jakob Disease (vCJD), Gerstmann-Straussler-Scheinker Syndrome, Fatal Familial Insomnia, and Kuru. In animals, prion disease includes Bovine Spongiform Encephalopathy (BSE or “mad cow disease”), Chronic Wasting Disease (CWD), Scrapie, Transmissible Mink Encephalopathy, Feline Spongiform Encephalopathy, and Ungulate Spongiform Encephalopathy. Prime editing may be used to install protective point mutations into a prion protein in order to prevent or halt the progression of any one of these prion diseases.

[1095] Classic CJD is a human prion disease. It is a neurodegenerative disorder with characteristic clinical and diagnostic features. This disease is rapidly progressive and always fatal. Infection with this disease leads to death usually within 1 year of onset of illness. CJD is a rapidly progressive, invariably fatal neurodegenerative disorder believed to be caused by an abnormal isoform of a cellular glycoprotein known as the prion protein. CJD occurs worldwide and the estimated annual incidence in many countries, including the United States, has been reported to be about one case per million population. The vast majority of CJD patients usually die within 1 year of illness onset. CJD is classified as a transmissible spongiform encephalopathy (TSE) along with other prion diseases that occur in humans and animals. In about 85% of patients, CJD occurs as a sporadic disease with no recognizable pattern of transmission. A smaller proportion of patients (5 to 15%) develop CJD because of inherited mutations of the prion protein gene. These inherited forms include Gerstmann-Straussler-Scheinker syndrome and fatal familial insomnia. No treatment is currently known for CJD.

[1096] Variant Creutzfeldt-Jakob disease (vCJD) is a prion disease that was first described in 1996 in the United Kingdom. There is now strong scientific evidence that the agent responsible for the outbreak of prion disease in cows, bovine spongiform encephalopathy (BSE or ‘mad cow’ disease), is the same agent responsible for the outbreak of vCJD in humans. Variant CJD (vCJD) is not the same disease as classic CJD (often simply called CJD). It has different clinical and pathologic characteristics from classic CJD. Each disease also has a particular genetic profile of the prion protein gene. Both disorders are invariably fatal brain diseases with unusually long incubation periods measured in years and are caused by an unconventional transmissible agent called a prion. No treatment is currently known for vCJD.

[1097] BSE (bovine spongiform encephalopathy or “mad cow disease”) is a progressive neurological disorder of cattle that results from infection by an unusual transmissible agent called a prion. The nature of the transmissible agent is not well understood. Currently, the most accepted theory is that the agent is a modified form of a normal protein known as prion protein. For reasons that are not yet understood, the normal prion protein changes into a pathogenic (harmful) form that then damages the central nervous system of cattle. There is increasing evidence that there are different strains of BSE: the typical or classic BSE strain responsible for the outbreak in the United Kingdom and two atypical strains (H and L strains). No treatment is currently known for BSE.

[1098] Chronic wasting disease (CWD) is a prion disease that affects deer, elk, reindeer, sika deer and moose. It has been found in some areas of North America, including Canada and the United States, Norway and South Korea. It may take over a year before an infected animal develops symptoms, which can include drastic weight loss (wasting), stumbling, listlessness and other neurologic symptoms. CWD can affect animals of all ages and some infected animals may die without ever developing the disease. CWD is fatal to animals and there are no treatments or vaccines.

[1099] The causative agents of TSEs are believed to be prions. The term “prions” refers to abnormal, pathogenic agents that are transmissible and are able to induce abnormal folding of specific normal cellular proteins called prion proteins that are found most abundantly in the brain. The functions of these normal prion proteins are still not completely understood. The abnormal folding of the prion proteins leads to brain damage and the characteristic signs and symptoms of the disease. Prion diseases are usually rapidly progressive and always fatal.

[1100] As used herein, the term “prion” shall mean an infectious particle known to cause diseases (spongiform encephalopathies) in humans and animals. The term “prion” is a contraction of the words “protein” and “infection” and the particles are comprised largely if not exclusively of PRNPsc molecules encoded by a PRNP gene which expresses PRNPc which changes conformation to become PRNPsc. Prions are distinct from bacteria, viruses and viroids. Known prions include those which infect animals to cause scrapie, a transmissible, degenerative disease of the nervous system of sheep and goats as well as bovine spongiform encephalopathies (BSE) or mad cow disease and feline spongiform encephalopathies of cats. Four prion diseases, as discussed above, known to affect humans are (1) kuru, (2) Creutzfeldt-Jakob Disease (CJD), (3) Gerstmann-Strassler-Scheinker Disease (GSS), and (4) fatal familial insomnia (FFI). As used herein prion includes all forms of prions causing all or any of these diseases or others in any animals used—and in particular in humans and in domesticated farm animals.

[1101] In general, and without wishing to be bound by theory, prior diseases are caused by misfolding of prion proteins. Such diseases—often called deposition diseases—the misfolding of the prion proteins can be accounted for as follows. If A is the normally synthesized gene product that carries out an intended physiologic role in a monomeric or oligomeric state, A* is a conformationally activated form of A that is competent to undergo a dramatic conformational change, B is the conformationally altered state that prefers multimeric assemblies (i.e., the misfolded form which forms depositions) and Bₙ is the multimeric material that is pathogenic and relatively difficult to recycle. For the prion diseases, PRNPc and PRNPsc correspond to states A and Bₙ where A is largely helical and monomeric and Bₙ is β-rich and multimeric.

[1102] It is known that certain mutations in prion proteins can be associated with increased risk of prior disease. Conversely, certain mutations in prion proteins can be protective in nature. See Bagynszky et al., “Characterization of mutations in PRNP (prion) gene and their possible roles in neurodegenerative diseases,” Neuropsychiatr Dis Treat., 2018; 14: 2067-2085, the contents of which are incorporated herein by reference.

[1103] PRNP (NCBI RefSeq No. NP_000302.1 (SEQ ID NO: 291))—the human prion protein—is encoded by a 16 kb long gene, located on chromosome 20 (4686151-4701588). It contains two exons, and the exon 2 carries the open reading frame which encodes the 253 amino acid (AA) long PrP protein. Exon 1 is a noncoding exon, which may serve as transcriptional initiation site. The post-translational modifications result in the removal of the first 22 AA N-terminal fragment (NTF) and the last 23 AA C-terminal fragment (CTF). The NTF is cleaved after PrP transport to the endoplasmic reticulum (ER), while the CTF (glycosylphosphatidylinositol [GPI] signal peptide [GPI-SP]) is cleaved by the GPI anchor. GPI anchor could be involved in PrP protein transport. It may also play a role of attachment of prion protein into the outer surface of cell membrane. Normal PrP is composed of a long N-terminal loop (which contains the octapeptide repeat region), two short β sheets, three α helices, and a C-terminal region (which contains the GPI anchor). Cleavage of PrP results in a 208 AA long glyocoprotein, anchored in the cell membrane.

[1104] The 253 amino acid sequence of PRNP (NP_000302.1) is as follows:

(SEQ ID NO: 291)
MANLGCWMLVLFVATWSDLGLCKKRPKPGGWNTGGSRYPGQGSPGGNRYP
PQGGGGWGQPHGGGWGQPHGGGWGQPHGGGWGQPHGGGWGQGGGTHSQWN
KPSKPKTNMKHMAGAAAAGAVVGGLGGYMLGSAMSRPIIHFGSDYEDRYY
RENMHRYPNQVYYRPMDEYSNQNNFVHDCVNITIKQHTVTTTTKGENFTE
TDVKMMERVVEQMCITQYERESQAYYQRGSSMVLFSSPPVILLISFLIFL
IVG.

[1105] The 253 amino acid sequence of PRNP (NP_000302.1) is encoded by the following nucleotide sequence (NCBI Ref. Seq No. NM_000311.5, “Homo sapiens prion protein (PRNP), transcript variant 1, mRNA), is as follows:

(SEQ ID NO: 292)
GCGAACCTTGGCTGCTGGATGCTGGTTCTCTTTGTGGCCACATGGAGTGA
CCTGGGCCTCTGCAAGAAGCGCCCGAAGCCTGGAGGATGGAACACTGGGG
GCAGCCGATACCCGGGGCAGGGCAGCCCTGGAGGCAACCGCTACCCACCT
CAGGGCGGTGGTGGCTGGGGGCAGCCTCATGGTGGTGGCTGGGGGCAGCC
TCATGGTGGTGGCTGGGGGCAGCCCCATGGTGGTGGCTGGGGACAGCCTC
ATGGTGGTGGCTGGGGTCAAGGAGGTGGCACCCACAGTCAGTGGAACAAG
CCGAGTAAGCCAAAAACCAACATGAAGCACATGGCTGGTGCTGCAGCAGC
TGGGGCAGTGGTGGGGGGCCTTGGCGGCTACATGCTGGGAAGTGCCATGA
GCAGGCCCATCATACATTTCGGCAGTGACTATGAGGACCGTTACTATCGT
GAAAACATGCACCGTTACCCCAACCAAGTGTACTACAGGCCCATGGATGA
GTACAGCAACCAGAACAACTTTGTGCACGACTGCGTCAATATCACAATCA
AGCAGCACACGGTCACCACAACCACCAAGGGGGAGAACTTCACCGAGACC
GACGTTAAGATGATGGAGCGCGTGGTTGAGCAGATGTGTATCACCCAGTA
CGAGAGGGAATCTCAGGCCTATTACCAGAGAGGATCGAGCATGGTCCTCT
TCTCCTCTCCACCTGTGATCCTCCTGATCTCTTTCCTCATCTTCCTGATA
GTGGGATGAGGAAGGTCTTCCTGTTTTCACCATCTTTCTAATCTTTTTCC
AGCTTGAGGGAGGCGGTATCCACCTGCAGCCCTTTTAGTGGTGGTGTCTC
ACTCTTTCTTCTCTCTTTGTCCCGGATAGGCTAATCAATACCCTTGGCAC
TGATGGGCACTGGAAAACATAGAGTAGACCTGAGATGCTGGTCAAGCCCC
CTTTGATTGAGTTCATCATGAGCCGTTGCTAATGCCAGGCCAGTAAAAGT
ATAACAGCAAATAACCATTGGTTAATCTGGACTTATTTTTGGACTTAGTG
CAACAGGTTGAGGCTAAAACAAATCTCAGAACAGTCTGAAATACCTTTGC
CTGGATACCTCTGGCTCCTTCAGCAGCTAGAGCTCAGTATACTAATGCCC
TATCTTAGTAGAGATTTCATAGCTATTTAGAGATATTTTCCATTTTAAGA
AAACCCGACAACATTTCTGCCAGGTTTGTTAGGAGGCCACATGATACTTA
TTCAAAAAAATCCTAGAGATTCTTAGCTCTTGGGATGCAGGCTCAGCCCG
CTGGAGCATGAGCTCTGTGTGTACCGAGAACTGGGGTGATGTTTTACTTT
TCACAGTATGGGCTACACAGCAGCTGTTCAACAAGAGTAAATATTGTCAC
AACACTGAACCTCTGGCTAGAGGACATATTCACAGTGAACATAACTGTAA
CATATATGAAAGGCTTCTGGGACTTGAAATCAAATGTTTGGGAATGGTGC
CCTTGGAGGCAACCTCCCATTTTAGATGTTTAAAGGACCCTATATGTGGC
ATTCCTTTCTTTAAACTATAGGTAATTAAGGCAGCTGAAAAGTAAATTGC
CTTCTAGACACTGAAGGCAAATCTCCTTTGTCCATTTACCTGGAAACCAG
AATGATTTTGACATACAGGAGAGCTGCAGTTGTGAAAGCACCATCATCAT
AGAGGATGATGTAATTAAAAAATGGTCAGTGTGCAAAGAAAAGAACTGCT
TGCATTTCTTTATTTCTGTCTCATAATTGTCAAAAACCAGAATTAGGTCA
AGTTCATAGTTTCTGTAATTGGCTTTTGAATCAAAGAATAGGGAGACAAT
CTAAAAAATATCTTAGGTTGGAGATGACAGAAATATGATTGATTTGAAGT
GGAAAAAGAAATTCTGTTAATGTTAATTAAAGTAAAATTATTCCCTGAAT
TGTTTGATATTGTCACCTAGCAGATATGTATTACTTTTCTGCAATGTTAT
TATTGGCTTGCACTTTGTGAGTATTCTATGTAAAAATATATATGTATATA
AAATATATATTGCATAGGACAGACTTAGGAGTTTTGTTTAGAGCAGTTAA
CATCTGAAGTGTCTAATGCATTAACTTTTGTAAGGTACTGAATACTTAAT
ATGTGGGAAACCCTTTTGCGTGGTCCTTAGGCTTACAATGTGCACTGAAT
CGTTTCATGTAAGAATCCAAAGTGGACACCATTAACAGGTCTTTGAAATA
TGCATGTACTTTATATTTTCTATATTTGTAACTTTGCATGTTCTTGTTTT
GTTATATAAAAAAATTGTAAATGTTTAATATCTGACTGAAATTAAACGAG
CGAAGATGAGCACCA

[1106] Mutation sites relative to PRNP (NP_000302.1) which are linked to CJD and FFI are reported are as follows. These mutations can be removed or installed using the prime editors disclosed herein.

| | AMINO ACID SEQUENCE OF MUTANT PRNP LINKED TO CJD PRION |
|---|---|
| | DISEASE (SEE TABLE 1 OF BAGYNSZKY ET AL., 2018) (RELATIVE TO |
| MUTATION | SEQ ID NO: 291 OF PRNP NP_000302.1) |
| D178N | MANLGCWMLVLFVATWSDLGLCKKRPKPGGWNTGGSRYPGQGSPGGNR |
| | YPPQGGGGWGQPHGGGWGQPHGGGWGQPHGGGWGQPHGGGWGQGG |
| | GTHSQWNKPSKPKTNMKHMAGAAAAGAVVGGLGGYMLGSAMSRPIIHF |
| | GSDYEDRYYRENMHRYPNQVYYRPMDEYSNQNNFVHNCVNITIKQHTVT |
| | TTTKGENFTETDVKMMERVVEQMCITQYERESQAYYQRGSSMVLFSSPPV |
| | (SEQ ID NO: 3940) |
| T188K | MANLGCWMLVLFVATWSDLGLCKKRPKPGGWNTGGSRYPGQGSPGGNR |
| | YPPQGGGGWGQPHGGGWGQPHGGGWGQPHGGGWGQPHGGGWGQGG |
| | GTHSQWNKPSKPKTNMKHMAGAAAAGAVVGGLGGYMLGSAMSRPIIHF |
| | GSDYEDRYYRENMHRYPNQVYYRPMDEYSNQNNFVHDCVNITIKQHKVT |
| | TTTKGENFTETDVKMMERVVEQMCITQYERESQAYYQRGSSMVLFSSPPV |
| | (SEQ ID NO: 3941) |
| E196K | MANLGCWMLVLFVATWSDLGLCKKRPKPGGWNTGGSRYPGQGSPGGNR |
| | YPPQGGGGWGQPHGGGWGQPHGGGWGQPHGGGWGQPHGGGWGQGG |
| | GTHSQWNKPSKPKTNMKHMAGAAAAGAVVGGLGGYMLGSAMSRPIIHF |
| | GSDYEDRYYRENMHRYPNQVYYRPMDEYSNQNNFVHDCVNITIKQHTVT |
| | TTTKGKNFTETDVKMMERVVEQMCITQYERESQAYYQRGSSMVLFSSPPV |
| | (SEQ ID NO: 3942) |
| E196A | MANLGCWMLVLFVATWSDLGLCKKRPKPGGWNTGGSRYPGQGSPGGNR |
| | YPPQGGGGWGQPHGGGWGQPHGGGWGQPHGGGWGQPHGGGWGQGG |
| | GTHSQWNKPSKPKTNMKHMAGAAAAGAVVGGLGGYMLGSAMSRPIIHF |
| | GSDYEDRYYRENMHRYPNQVYYRPMDEYSNQNNFVHDCVNITIKQHTVT |
| | TTTKGANFTETDVKMMERVVEQMCITQYERESQAYYQRGSSMVLFSSPPV |
| | (SEQ ID NO: 296) |
| E200K | MANLGCWMLVLFVATWSDLGLCKKRPKPGGWNTGGSRYPGQGSPGGNR |
| | YPPQGGGGWGQPHGGGWGQPHGGGWGQPHGGGWGQPHGGGWGQGG |
| | GTHSQWNKPSKPKTNMKHMAGAAAAGAVVGGLGGYMLGSAMSRPIIHF |
| | GSDYEDRYYRENMHRYPNQVYYRPMDEYSNQNNFVHDCVNITIKQHTVT |
| | TTTKGENFTKTDVKMMERVVEQMCITQYERESQAYYQRGSSMVLFSSPPV |
| | (SEQ ID NO: 3943) |
| E200G | MANLGCWMLVLFVATWSDLGLCKKRPKPGGWNTGGSRYPGQGSPGGNR |
| | YPPQGGGGWGQPHGGGWGQPHGGGWGQPHGGGWGQPHGGGWGQGG |
| | GTHSQWNKPSKPKTNMKHMAGAAAAGAVVGGLGGYMLGSAMSRPIIHF |
| | GSDYEDRYYRENMHRYPNQVYYRPMDEYSNQNNFVHDCVNITIKQHTVT |
| | TTTKGENFTGTDVKMMERVVEQMCITQYERESQAYYQRGSSMVLFSSPPV |
| | (SEQ ID NO: 298) |
| V203I | MANLGCWMLVLFVATWSDLGLCKKRPKPGGWNTGGSRYPGQGSPGGNR |
| | YPPQGGGGWGQPHGGGWGQPHGGGWGQPHGGGWGQPHGGGWGQGG |
| | GTHSQWNKPSKPKTNMKHMAGAAAAGAVVGGLGGYMLGSAMSRPIIHF |
| | GSDYEDRYYRENMHRYPNQVYYRPMDEYSNQNNFVHDCVNITIKQHTVT |
| | TTTKGENFTETDIKMMERVVEQMCITQYERESQAYYQRGSSMVLFSSPPV |
| | (SEQ ID NO: 3944) |
| R208H | MANLGCWMLVLFVATWSDLGLCKKRPKPGGWNTGGSRYPGQGSPGGNR |
| | YPPQGGGGWGQPHGGGWGQPHGGGWGQPHGGGWGQPHGGGWGQGG |
| | GTHSQWNKPSKPKTNMKHMAGAAAAGAVVGGLGGYMLGSAMSRPIIHF |
| | GSDYEDRYYRENMHRYPNQVYYRPMDEYSNQNNFVHDCVNITIKQHTVT |
| | TTTKGENFTETDVKMMEHVVEQMCITQYERESQAYYQRGSSMVLFSSPPV |
| | (SEQ ID NO: 3945) |
| V210I | MANLGCWMLVLFVATWSDLGLCKKRPKPGGWNTGGSRYPGQGSPGGNR |
| | YPPQGGGGWGQPHGGGWGQPHGGGWGQPHGGGWGQPHGGGWGQGG |
| | GTHSQWNKPSKPKTNMKHMAGAAAAGAVVGGLGGYMLGSAMSRPIIHF |
| | GSDYEDRYYRENMHRYPNQVYYRPMDEYSNQNNFVHDCVNITIKQHTVT |
| | TTTKGENFTETDVKMMERVIEQMCITQYERESQAYYQRGSSMVLFSSPPV |
| | (SEQ ID NO: 3946) |
| E211Q | MANLGCWMLVLFVATWSDLGLCKKRPKPGGWNTGGSRYPGQGSPGGNR |
| | YPPQGGGGWGQPHGGGWGQPHGGGWGQPHGGGWGQPHGGGWGQGG |
| | GTHSQWNKPSKPKTNMKHMAGAAAAGAVVGGLGGYMLGSAMSRPIIHF |
| | GSDYEDRYYRENMHRYPNQVYYRPMDEYSNQNNFVHDCVNITIKQHTVT |
| | TTTKGENFTETDVKMMERVVQQMCITQYERESQAYYQRGSSMVLFSSPPV |
| | (SEQ ID NO: 3947) |
| M232R | MANLGCWMLVLFVATWSDLGLCKKRPKPGGWNTGGSRYPGQGSPGGNR |
| | YPPQGGGGWGQPHGGGWGQPHGGGWGQPHGGGWGQPHGGGWGQGG |
| | GTHSQWNKPSKPKTNMKHMAGAAAAGAVVGGLGGYMLGSAMSRPIIHF |
| | GSDYEDRYYRENMHRYPNQVYYRPMDEYSNQNNFVHDCVNITIKQHTVT |
| | TTTKGENFTETDVKMMERVVEQMCITQYERESQAYYQRGSSRVLFSSPPV |
| | (SEQ ID NO: 3948) |

[1107] Mutation sites relative to PRNP (NP_000302.1) (SEQ ID NO: 291) which are linked to GSS are reported, as follows:

| | AMINO ACID SEQUENCE OF MUTANT PRNP LINKED TO GSS PRION |
|---|---|
| | DISEASE (SEE TABLE 2 OF BAGYNSZKY ET AL., 2018) (RELATIVE TO |
| MUTATION | SEQ ID NO: 291 OF PRNP NP_000302.1) |
| P102L | MANLGCWMLVLFVATWSDLGLCKKRPKPGGWNTGGSRYPGQGSPGGNR |
| | YPPQGGGGWGQPHGGGWGQPHGGGWGQPHGGGWGQPHGGGWGQGG |
| | GTHSQWNKLSKPKTNMKHMAGAAAAGAVVGGLGGYMLGSAMSRPIIHF |
| | GSDYEDRYYRENMHRYPNQVYYRPMDEYSNQNNFVHDCVNITIKQHTVT |
| | TTTKGENFTETDVKMMERVVEQMCITQYERESQAYYQRGSSMVLFSSPPV |
| | (SEQ ID NO: 3949) |
| P105L | MANLGCWMLVLFVATWSDLGLCKKRPKPGGWNTGGSRYPGQGSPGGNR |
| | YPPQGGGGWGQPHGGGWGQPHGGGWGQPHGGGWGQPHGGGWGQGG |
| | GTHSQWNKPSKLKTNMKHMAGAAAAGAVVGGLGGYMLGSAMSRPIIHF |
| | GSDYEDRYYRENMHRYPNQVYYRPMDEYSNQNNFVHDCVNITIKQHTVT |
| | TTTKGENFTETDVKMMERVVEQMCITQYERESQAYYQRGSSMVLFSSPPV |
| | (SEQ ID NO: 3950) |
| A117V | MANLGCWMLVLFVATWSDLGLCKKRPKPGGWNTGGSRYPGQGSPGGNR |
| | YPPQGGGGWGQPHGGGWGQPHGGGWGQPHGGGWGQPHGGGWGQGG |
| | GTHSQWNKPSKPKTNMKHMAGAAVAGAVVGGLGGYMLGSAMSRPIIHF |
| | GSDYEDRYYRENMHRYPNQVYYRPMDEYSNQNNFVHDCVNITIKQHTVT |
| | TTTKGENFTETDVKMMERVVEQMCITQYERESQAYYQRGSSMVLFSSPPV |
| | (SEQ ID NO: 3951) |
| G131V | MANLGCWMLVLFVATWSDLGLCKKRPKPGGWNTGGSRYPGQGSPGGNR |
| | YPPQGGGGWGQPHGGGWGQPHGGGWGQPHGGGWGQPHGGGWGQGG |
| | GTHSQWNKPSKPKTNMKHMAGAAAAGAVVGGLGGYMLVSAMSRPIIHF |
| | GSDYEDRYYRENMHRYPNQVYYRPMDEYSNQNNFVHDCVNITIKQHTVT |
| | TTTKGENFTETDVKMMERVVEQMCITQYERESQAYYQRGSSMVLFSSPPV |
| | (SEQ ID NO: 3952) |
| V176G | MANLGCWMLVLFVATWSDLGLCKKRPKPGGWNTGGSRYPGQGSPGGNR |
| | YPPQGGGGWGQPHGGGWGQPHGGGWGQPHGGGWGQPHGGGWGQGG |
| | GTHSQWNKPSKPKTNMKHMAGAAAAGAVVGGLGGYMLGSAMSRPIIHF |
| | GSDYEDRYYRENMHRYPNQVYYRPMDEYSNQNNFGHDCVNITIKQHTVT |
| | TTTKGENFTETDVKMMERVVEQMCITQYERESQAYYQRGSSMVLFSSPPV |
| | (SEQ ID NO: 3953) |
| H187R | MANLGCWMLVLFVATWSDLGLCKKRPKPGGWNTGGSRYPGQGSPGGNR |
| | YPPQGGGGWGQPHGGGWGQPHGGGWGQPHGGGWGQPHGGGWGQGG |
| | GTHSQWNKPSKPKTNMKHMAGAAAAGAVVGGLGGYMLGSAMSRPIIHF |
| | GSDYEDRYYRENMHRYPNQVYYRPMDEYSNQNNFVHDCVNITIKQRTVT |
| | TTTKGENFTETDVKMMERVVEQMCITQYERESQAYYQRGSSMVLFSSPPV |
| | (SEQ ID NO: 3954) |
| | MANLGCWMLVLFVATWSDLGLCKKRPKPGGWNTGGSRYPGQGSPGGNR |
| | YPPQGGGGWGQPHGGGWGQPHGGGWGQPHGGGWGQPHGGGWGQGG |
| | GTHSQWNKPSKPKTNMKHMAGAAAAGAVVGGLGGYMLGSAMSRPIIHF |
| | GSDYEDRYYRENMHRYPNQVYYRPMDEYSNQNNFVHDCVNITIKQHTVT |
| | TTTKGENFTETDVKMMERVVEQMCITQYERESQAYYQRGSSMVLFSSPPV |
| | (SEQ ID NO: 487) |
| F198S | MANLGCWMLVLFVATWSDLGLCKKRPKPGGWNTGGSRYPGQGSPGGNR |
| | YPPQGGGGWGQPHGGGWGQPHGGGWGQPHGGGWGQPHGGGWGQGG |
| | GTHSQWNKPSKPKTNMKHMAGAAAAGAVVGGLGGYMLGSAMSRPIIHF |
| | GSDYEDRYYRENMHRYPNQVYYRPMDEYSNQNNFVHDCVNITIKQHTVT |
| | TTTKGENSTETDVKMMERVVEQMCITQYERESQAYYQRGSSMVLFSSPPV |
| | (SEQ ID NO: 3955) |
| D202N | MANLGCWMLVLFVATWSDLGLCKKRPKPGGWNTGGSRYPGQGSPGGNR |
| | YPPQGGGGWGQPHGGGWGQPHGGGWGQPHGGGWGQPHGGGWGQGG |
| | GTHSQWNKPSKPKTNMKHMAGAAAAGAVVGGLGGYMLGSAMSRPIIHF |
| | GSDYEDRYYRENMHRYPNQVYYRPMDEYSNQNNFVHDCVNITIKQHTVT |
| | TTTKGENFTETNVKMMERVVEQMCITQYERESQAYYQRGSSMVLFSSPPV |
| | (SEQ ID NO: 3956) |
| Q212P | MANLGCWMLVLFVATWSDLGLCKKRPKPGGWNTGGSRYPGQGSPGGNR |
| | YPPQGGGGWGQPHGGGWGQPHGGGWGQPHGGGWGQPHGGGWGQGG |
| | GTHSQWNKPSKPKTNMKHMAGAAAAGAVVGGLGGYMLGSAMSRPIIHF |
| | GSDYEDRYYRENMHRYPNQVYYRPMDEYSNQNNFVHDCVNITIKQHTVT |
| | TTTKGENFTETDVKMMERVVEPMCITQYERESQAYYQRGSSMVLFSSPPV |
| | (SEQ ID NO: 3957) |
| Q217R | MANLGCWMLVLFVATWSDLGLCKKRPKPGGWNTGGSRYPGQGSPGGNR |
| | YPPQGGGGWGQPHGGGWGQPHGGGWGQPHGGGWGQPHGGGWGQGG |
| | GTHSQWNKPSKPKTNMKHMAGAAAAGAVVGGLGGYMLGSAMSRPIIHF |
| | GSDYEDRYYRENMHRYPNQVYYRPMDEYSNQNNFVHDCVNITIKQHTVT |
| | TTTKGENFTETDVKMMERVVEQMCITRYERESQAYYQRGSSMVLFSSPPV |
| | (SEQ ID NO: 3958) |
| M232T | MANLGCWMLVLFVATWSDLGLCKKRPKPGGWNTGGSRYPGQGSPGGNR |
| | YPPQGGGGWGQPHGGGWGQPHGGGWGQPHGGGWGQPHGGGWGQGG |
| | GTHSQWNKPSKPKTNMKHMAGAAAAGAVVGGLGGYMLGSAMSRPIIHF |
| | GSDYEDRYYRENMHRYPNQVYYRPMDEYSNQNNFVHDCVNITIKQHTVT |
| | TTTKGENFTETDVKMMERVVEQMCITQYERESQAYYQRGSSTVLFSSPPV |
| | (SEQ ID NO: 3959) |

[1108] Mutation sites relative to PRNP (NP_000302.1) (SEQ ID NO: 291) which are linked to a possible protective nature against prion disease, as follows:

| | AMINO ACID SEQUENCE OF MUTANT PRNP LINKED TO A PROTECTIVE |
|---|---|
| | NATURE AGAINST PRION DISEASE (SEE TABLE 4 OF BAGYNSZKY ET |
| MUTATION | AL., 2018) (RELATIVE TO SEQ ID NO: 291 OF PRNP NP_000302.1) |
| G127S | MANLGCWMLVLFVATWSDLGLCKKRPKPGGWNTGGSRYPGQGSPGGNR |
| | YPPQGGGGWGQPHGGGWGQPHGGGWGQPHGGGWGQPHGGGWGQGG |
| | GTHSQWNKPSKPKTNMKHMAGAAAAGAVVGGLGSYMLGSAMSRPIIHF |
| | GSDYEDRYYRENMHRYPNQVYYRPMDEYSNQNNFVHDCVNITIKQHTVT |
| | TTTKGENFTETDVKMMERVVEQMCITQYERESQAYYQRGSSMVLFSSPPV |
| | (SEQ ID NO: 3960) |
| G127V | MANLGCWMLVLFVATWSDLGLCKKRPKPGGWNTGGSRYPGQGSPGGNR |
| | YPPQGGGGWGQPHGGGWGQPHGGGWGQPHGGGWGQPHGGGWGQGG |
| | GTHSQWNKPSKPKTNMKHMAGAAAAGAVVGGLGVYMLGSAMSRPIIHF |
| | GSDYEDRYYRENMHRYPNQVYYRPMDEYSNQNNFVHDCVNITIKQHTVT |
| | TTTKGENFTETDVKMMERVVEQMCITQYERESQAYYQRGSSMVLFSSPPV |
| | (SEQ ID NO: 3961) |
| M129V | MANLGCWMLVLFVATWSDLGLCKKRPKPGGWNTGGSRYPGQGSPGGNR |
| | YPPQGGGGWGQPHGGGWGQPHGGGWGQPHGGGWGQPHGGGWGQGG |
| | GTHSQWNKPSKPKTNMKHMAGAAAAGAVVGGLGGYVLGSAMSRPIIHF |
| | GSDYEDRYYRENMHRYPNQVYYRPMDEYSNQNNFVHDCVNITIKQHTVT |
| | TTTKGENFTETDVKMMERVVEQMCITQYERESQAYYQRGSSMVLFSSPPV |
| | (SEQ ID NO: 3962) |
| D167G | MANLGCWMLVLFVATWSDLGLCKKRPKPGGWNTGGSRYPGQGSPGGNR |
| | YPPQGGGGWGQPHGGGWGQPHGGGWGQPHGGGWGQPHGGGWGQGG |
| | GTHSQWNKPSKPKTNMKHMAGAAAAGAVVGGLGGYMLGSAMSRPIIHF |
| | GSDYEDRYYRENMHRYPNQVYYRPMGEYSNQNNFVHDCVNITIKQHTVT |
| | TTTKGENFTETDVKMMERVVEQMCITQYERESQAYYQRGSSMVLFSSPPV |
| | (SEQ ID NO: 3963) |
| D167N | MANLGCWMLVLFVATWSDLGLCKKRPKPGGWNTGGSRYPGQGSPGGNR |
| | YPPQGGGGWGQPHGGGWGQPHGGGWGQPHGGGWGQPHGGGWGQGG |
| | GTHSQWNKPSKPKTNMKHMAGAAAAGAVVGGLGGYMLGSAMSRPIIHF |
| | GSDYEDRYYRENMHRYPNQVYYRPMNEYSNQNNFVHDCVNITIKQHTVT |
| | TTTKGENFTETDVKMMERVVEQMCITQYERESQAYYQRGSSMVLFSSPPV |
| | (SEQ ID NO: 3964) |
| N171S | MANLGCWMLVLFVATWSDLGLCKKRPKPGGWNTGGSRYPGQGSPGGNR |
| | YPPQGGGGWGQPHGGGWGQPHGGGWGQPHGGGWGQPHGGGWGQGG |
| | GTHSQWNKPSKPKTNMKHMAGAAAAGAVVGGLGGYMLGSAMSRPIIHF |
| | GSDYEDRYYRENMHRYPNQVYYRPMDEYSSQNNFVHDCVNITIKQHTVT |
| | TTTKGENFTETDVKMMERVVEQMCITQYERESQAYYQRGSSMVLFSSPPV |
| | (SEQ ID NO: 3965) |
| E219K | MANLGCWMLVLFVATWSDLGLCKKRPKPGGWNTGGSRYPGQGSPGGNR |
| | YPPQGGGGWGQPHGGGWGQPHGGGWGQPHGGGWGQPHGGGWGQGG |
| | GTHSQWNKPSKPKTNMKHMAGAAAAGAVVGGLGGYMLGSAMSRPIIHF |
| | GSDYEDRYYRENMHRYPNQVYYRPMDEYSNQNNFVHDCVNITIKQHTVT |
| | TTTKGENFTETDVKMMERVVEQMCITQYKRESQAYYQRGSSMVLFSSPPV |
| | (SEQ ID NO: 3966) |
| P238S | MANLGCWMLVLFVATWSDLGLCKKRPKPGGWNTGGSRYPGQGSPGGNR |
| | YPPQGGGGWGQPHGGGWGQPHGGGWGQPHGGGWGQPHGGGWGQGG |
| | GTHSQWNKPSKPKTNMKHMAGAAAAGAVVGGLGGYMLGSAMSRPIIHF |
| | GSDYEDRYYRENMHRYPNQVYYRPMDEYSNQNNFVHDCVNITIKQHTVT |
| | TTTKGENFTETDVKMMERVVEQMCITQYERESQAYYQRGSSMVLFSSSPV |
| | (SEQ ID NO: 3967) |

[1109] Thus, in various embodiments, prime editing may be used to remove a mutation in PRNP that is linked to prion disease or install a mutation in PRNP that is considered to be protective against prion disease. For example, prime editing may be use to remove or restore a D178N, V180I, T188K, E196K, E196A, E200K, E200G, V203I, R208H, V210I, E221Q, I215V, or M232R mutation in the PRNP protein (relative to PRNP of NP_000302.1) (SEQ ID NO: 291). In other embodiments, prime editing may be used to remove or restore a P102L, P105L, A117V, G131V, V176G, H187R, F198S, D202N, Q212P, Q217R, or M232T mutation in the PRNP protein (relative to PRNP of NP_000302.1) (SEQ ID NO: 291). By removing or correcting for the presence of such mutations in PRNP using prime editing, the risk of prion disease may be reduced or eliminated.

[1110] In other embodiments, prime editing may be used to install a protective mutation in PRNP that is linked to a protective effect against one or more prion diseases. For example, prime editing may be used to install a G127S, G127V, M129V, D167G, D167N, N171S, E219K, or P238S protective mutation in PRNP (relative to PRNP of NP_000302.1) (SEQ ID NO: 291). In still other embodiments, the protective mutation may be any alternate amino acid installed at G127, G127, M129, D167, D167, N171, E219, or P238 in PRNP (relative to PRNP of NP_000302.1) (SEQ ID NO: 291).

[1111] In particular embodiments, prime editing may be used to install a G127V protective mutation in PRNP, as illustrated in FIG. 27 and discussed in Example 5.

[1112] In another embodiment, prime editing may be used to install an E219K protective mutation in PRNP.

[1113] The PRNP protein and the protective mutation site are conserved in mammals, so in addition to treating human disease it could also be used to generate cows and sheep that are immune to prion disease, or even help cure wild populations of animals that are suffering from prion disease. Prime editing has already been used to achieve ˜25% installation of a naturally occurring protective allele in human cells, and previous mouse experiments indicate that this level of installation is sufficient to cause immunity from most prion diseases. This method is the first and potentially only current way to install this allele with such high efficiency in most cell types. Another possible strategy for treatment is to use prime editing to reduce or eliminate the expression of PRNP by installing an early stop codon in the gene.

[1114] Using the principles described herein for PEgRNA design, appropriate PEgRNAs may be designed for installing desired protective mutations, or for removing prion disease-associated mutations from PRNP. For example, the below list of PEgRNAs can be used to install the G127V protective allele and the E219K protective allele in human PRNP, as well as the G127V protective allele in PRNP of various animals.

### [9] Pharmaceutical Compositions

[1115] Other aspects of the present disclosure relate to pharmaceutical compositions comprising any of the various components of the prime editing system described herein (e.g., including, but not limited to, the napDNAbps, reverse transcriptases, fusion proteins (e.g., comprising napDNAbps and reverse transcriptases), extended guide RNAs, and complexes comprising fusion proteins and extended guide RNAs, as well as accessory elements, such as second strand nicking components and 5′ endogenous DNA flap removal endonucleases for helping to drive the prime editing process towards the edited product formation).

[1116] The term “pharmaceutical composition”, as used herein, refers to a composition formulated for pharmaceutical use. In some embodiments, the pharmaceutical composition further comprises a pharmaceutically acceptable carrier. In some embodiments, the pharmaceutical composition comprises additional agents (e.g. for specific delivery, increasing half-life, or other therapeutic compounds).

[1117] As used here, the term “pharmaceutically-acceptable carrier” means a pharmaceutically-acceptable material, composition or vehicle, such as a liquid or solid filler, diluent, excipient, manufacturing aid (e.g., lubricant, talc magnesium, calcium or zinc stearate, or steric acid), or solvent encapsulating material, involved in carrying or transporting the compound from one site (e.g., the delivery site) of the body, to another site (e.g., organ, tissue or portion of the body). A pharmaceutically acceptable carrier is “acceptable” in the sense of being compatible with the other ingredients of the formulation and not injurious to the tissue of the subject (e.g., physiologically compatible, sterile, physiologic pH, etc.). Some examples of materials which can serve as pharmaceutically-acceptable carriers include: (1) sugars, such as lactose, glucose and sucrose; (2) starches, such as corn starch and potato starch; (3) cellulose, and its derivatives, such as sodium carboxymethyl cellulose, methylcellulose, ethyl cellulose, microcrystalline cellulose and cellulose acetate; (4) powdered tragacanth; (5) malt; (6) gelatin; (7) lubricating agents, such as magnesium stearate, sodium lauryl sulfate and talc; (8) excipients, such as cocoa butter and suppository waxes; (9) oils, such as peanut oil, cottonseed oil, safflower oil, sesame oil, olive oil, corn oil and soybean oil; (10) glycols, such as propylene glycol; (11) polyols, such as glycerin, sorbitol, mannitol and polyethylene glycol (PEG); (12) esters, such as ethyl oleate and ethyl laurate; (13) agar; (14) buffering agents, such as magnesium hydroxide and aluminum hydroxide; (15) alginic acid; (16) pyrogen-free water; (17) isotonic saline; (18) Ringer's solution; (19) ethyl alcohol; (20) pH buffered solutions; (21) polyesters, polycarbonates and/or polyanhydrides; (22) bulking agents, such as polypeptides and amino acids (23) serum component, such as serum albumin, HDL and LDL; (22) C2-C12 alcohols, such as ethanol; and (23) other non-toxic compatible substances employed in pharmaceutical formulations. Wetting agents, coloring agents, release agents, coating agents, sweetening agents, flavoring agents, perfuming agents, preservative and antioxidants can also be present in the formulation. The terms such as “excipient”, “carrier”, “pharmaceutically acceptable carrier” or the like are used interchangeably herein.

[1118] In some embodiments, the pharmaceutical composition is formulated for delivery to a subject, e.g., for gene editing. Suitable routes of administrating the pharmaceutical composition described herein include, without limitation: topical, subcutaneous, transdermal, intradermal, intralesional, intraarticular, intraperitoneal, intravesical, transmucosal, gingival, intradental, intracochlear, transtympanic, intraorgan, epidural, intrathecal, intramuscular, intravenous, intravascular, intraosseus, periocular, intratumoral, intracerebral, and intracerebroventricular administration.

[1119] In some embodiments, the pharmaceutical composition described herein is administered locally to a diseased site (e.g., tumor site). In some embodiments, the pharmaceutical composition described herein is administered to a subject by injection, by means of a catheter, by means of a suppository, or by means of an implant, the implant being of a porous, non-porous, or gelatinous material, including a membrane, such as a sialastic membrane, or a fiber.

[1120] In other embodiments, the pharmaceutical composition described herein is delivered in a controlled release system. In one embodiment, a pump may be used (see, e.g., Langer, 1990, Science 249:1527-1533; Sefton, 1989, CRC Crit. Ref. Biomed. Eng. 14:201; Buchwald et al., 1980, Surgery 88:507; Saudek et al., 1989, N. Engl. J. Med. 321:574). In another embodiment, polymeric materials can be used. (See, e.g., Medical Applications of Controlled Release (Langer and Wise eds., CRC Press, Boca Raton, Fla., 1974); Controlled Drug Bioavailability, Drug Product Design and Performance (Smolen and Ball eds., Wiley, New York, 1984); Ranger and Peppas, 1983, Macromol. Sci. Rev. Macromol. Chem. 23:61. See also Levy et al., 1985, Science 228:190; During et al., 1989, Ann. Neurol. 25:351; Howard et al., 1989, J. Neurosurg. 71:105). Other controlled release systems are discussed, for example, in Langer, supra.

[1121] In some embodiments, the pharmaceutical composition is formulated in accordance with routine procedures as a composition adapted for intravenous or subcutaneous administration to a subject, e.g., a human. In some embodiments, pharmaceutical composition for administration by injection are solutions in sterile isotonic aqueous buffer. Where necessary, the pharmaceutical can also include a solubilizing agent and a local anesthetic such as lignocaine to ease pain at the site of the injection. Generally, the ingredients are supplied either separately or mixed together in unit dosage form, for example, as a dry lyophilized powder or water free concentrate in a hermetically sealed container such as an ampoule or sachette indicating the quantity of active agent. Where the pharmaceutical is to be administered by infusion, it can be dispensed with an infusion bottle containing sterile pharmaceutical grade water or saline. Where the pharmaceutical composition is administered by injection, an ampoule of sterile water for injection or saline can be provided so that the ingredients can be mixed prior to administration.

[1122] A pharmaceutical composition for systemic administration may be a liquid, e.g., sterile saline, lactated Ringer's or Hank's solution. In addition, the pharmaceutical composition can be in solid forms and re-dissolved or suspended immediately prior to use. Lyophilized forms are also contemplated.

[1123] The pharmaceutical composition can be contained within a lipid particle or vesicle, such as a liposome or microcrystal, which is also suitable for parenteral administration. The particles can be of any suitable structure, such as unilamellar or plurilamellar, so long as compositions are contained therein. Compounds can be entrapped in “stabilized plasmid-lipid particles” (SPLP) containing the fusogenic lipid dioleoylphosphatidylethanolamine (DOPE), low levels (5-10 mol %) of cationic lipid, and stabilized by a polyethyleneglycol (PEG) coating (Zhang Y. P. et al., Gene Ther. 1999, 6:1438-47). Positively charged lipids such as N-[1-(2,3-dioleoyloxi)propyl]-N,N,N-trimethyl-amoniummethylsulfate, or “DOTAP,” are particularly preferred for such particles and vesicles. The preparation of such lipid particles is well known. See, e.g., U.S. Pat. Nos. 4,880,635; 4,906,477; 4,911,928; 4,917,951; 4,920,016; and 4,921,757; each of which is incorporated herein by reference.

[1124] The pharmaceutical composition described herein may be administered or packaged as a unit dose, for example. The term “unit dose” when used in reference to a pharmaceutical composition of the present disclosure refers to physically discrete units suitable as unitary dosage for the subject, each unit containing a predetermined quantity of active material calculated to produce the desired therapeutic effect in association with the required diluent; i.e., carrier, or vehicle.

[1125] Further, the pharmaceutical composition can be provided as a pharmaceutical kit comprising (a) a container containing a compound of the invention in lyophilized form and (b) a second container containing a pharmaceutically acceptable diluent (e.g., sterile water) for injection. The pharmaceutically acceptable diluent can be used for reconstitution or dilution of the lyophilized compound of the invention. Optionally associated with such container(s) can be a notice in the form prescribed by a governmental agency regulating the manufacture, use or sale of pharmaceuticals or biological products, which notice reflects approval by the agency of manufacture, use or sale for human administration.

[1126] In another aspect, an article of manufacture containing materials useful for the treatment of the diseases described above is included. In some embodiments, the article of manufacture comprises a container and a label. Suitable containers include, for example, bottles, vials, syringes, and test tubes. The containers may be formed from a variety of materials such as glass or plastic. In some embodiments, the container holds a composition that is effective for treating a disease described herein and may have a sterile access port. For example, the container may be an intravenous solution bag or a vial having a stopper pierce-able by a hypodermic injection needle. The active agent in the composition is a compound of the invention. In some embodiments, the label on or associated with the container indicates that the composition is used for treating the disease of choice. The article of manufacture may further comprise a second container comprising a pharmaceutically-acceptable buffer, such as phosphate-buffered saline, Ringer's solution, or dextrose solution. It may further include other materials desirable from a commercial and user standpoint, including other buffers, diluents, filters, needles, syringes, and package inserts with instructions for use.

### [10] Kits, Cells, Vectors, and Delivery

### Kits

[1127] The compositions of the present disclosure may be assembled into kits. In some embodiments, the kit comprises nucleic acid vectors for the expression of the prime editors described herein. In other embodiments, the kit further comprises appropriate guide nucleotide sequences (e.g., PEgRNAs and second-site gRNAs) or nucleic acid vectors for the expression of such guide nucleotide sequences, to target the Cas9 protein or prime editor to the desired target sequence.

[1128] The kit described herein may include one or more containers housing components for performing the methods described herein and optionally instructions for use. Any of the kit described herein may further comprise components needed for performing the assay methods. Each component of the kits, where applicable, may be provided in liquid form (e.g., in solution) or in solid form, (e.g., a dry powder). In certain cases, some of the components may be reconstitutable or otherwise processible (e.g., to an active form), for example, by the addition of a suitable solvent or other species (for example, water), which may or may not be provided with the kit.

[1129] In some embodiments, the kits may optionally include instructions and/or promotion for use of the components provided. As used herein, “instructions” can define a component of instruction and/or promotion, and typically involve written instructions on or associated with packaging of the disclosure. Instructions also can include any oral or electronic instructions provided in any manner such that a user will clearly recognize that the instructions are to be associated with the kit, for example, audiovisual (e.g., videotape, DVD, etc.), Internet, and/or web-based communications, etc. The written instructions may be in a form prescribed by a governmental agency regulating the manufacture, use, or sale of pharmaceuticals or biological products, which can also reflect approval by the agency of manufacture, use or sale for animal administration. As used herein, “promoted” includes all methods of doing business including methods of education, hospital and other clinical instruction, scientific inquiry, drug discovery or development, academic research, pharmaceutical industry activity including pharmaceutical sales, and any advertising or other promotional activity including written, oral and electronic communication of any form, associated with the disclosure. Additionally, the kits may include other components depending on the specific application, as described herein.

[1130] The kits may contain any one or more of the components described herein in one or more containers. The components may be prepared sterilely, packaged in a syringe and shipped refrigerated. Alternatively it may be housed in a vial or other container for storage. A second container may have other components prepared sterilely. Alternatively the kits may include the active agents premixed and shipped in a vial, tube, or other container.

[1131] The kits may have a variety of forms, such as a blister pouch, a shrink wrapped pouch, a vacuum sealable pouch, a sealable thermoformed tray, or a similar pouch or tray form, with the accessories loosely packed within the pouch, one or more tubes, containers, a box or a bag. The kits may be sterilized after the accessories are added, thereby allowing the individual accessories in the container to be otherwise unwrapped. The kits can be sterilized using any appropriate sterilization techniques, such as radiation sterilization, heat sterilization, or other sterilization methods known in the art. The kits may also include other components, depending on the specific application, for example, containers, cell media, salts, buffers, reagents, syringes, needles, a fabric, such as gauze, for applying or removing a disinfecting agent, disposable gloves, a support for the agents prior to administration, etc. Some aspects of this disclosure provide kits comprising a nucleic acid construct comprising a nucleotide sequence encoding the various components of the prime editing system described herein (e.g., including, but not limited to, the napDNAbps, reverse transcriptases, polymerases, fusion proteins (e.g., comprising napDNAbps and reverse transcriptases (or more broadly, polymerases), extended guide RNAs, and complexes comprising fusion proteins and extended guide RNAs, as well as accessory elements, such as second strand nicking components (e.g., second strand nicking gRNA) and 5′ endogenous DNA flap removal endonucleases for helping to drive the prime editing process towards the edited product formation). In some embodiments, the nucleotide sequence(s) comprises a heterologous promoter (or more than a single promoter) that drives expression of the prime editing system components.

[1132] Other aspects of this disclosure provide kits comprising one or more nucleic acid constructs encoding the various components of the prime editing system described herein, e.g., the comprising a nucleotide sequence encoding the components of the prime editing system capable of modifying a target DNA sequence. In some embodiments, the nucleotide sequence comprises a heterologous promoter that drives expression of the prime editing system components.

[1133] Some aspects of this disclosure provides kits comprising a nucleic acid construct, comprising (a) a nucleotide sequence encoding a napDNAbp (e.g., a Cas9 domain) fused to a reverse transcriptase and (b) a heterologous promoter that drives expression of the sequence of (a).

### Cells

[1134] Cells that may contain any of the compositions described herein include prokaryotic cells and eukaryotic cells. The methods described herein are used to deliver a Cas9 protein or a prime editor into a eukaryotic cell (e.g., a mammalian cell, such as a human cell). In some embodiments, the cell is in vitro (e.g., cultured cell. In some embodiments, the cell is in vivo (e.g., in a subject such as a human subject). In some embodiments, the cell is ex vivo (e.g., isolated from a subject and may be administered back to the same or a different subject).

[1135] Mammalian cells of the present disclosure include human cells, primate cells (e.g., vero cells), rat cells (e.g., GH3 cells, OC23 cells) or mouse cells (e.g., MC3T3 cells). There are a variety of human cell lines, including, without limitation, human embryonic kidney (HEK) cells, HeLa cells, cancer cells from the National Cancer Institute's 60 cancer cell lines (NCI60), DU145 (prostate cancer) cells, Lncap (prostate cancer) cells, MCF-7 (breast cancer) cells, MDA-MB-438 (breast cancer) cells, PC3 (prostate cancer) cells, T47D (breast cancer) cells, THP-1 (acute myeloid leukemia) cells, U87 (glioblastoma) cells, SHSY5Y human neuroblastoma cells (cloned from a myeloma) and Saos-2 (bone cancer) cells. In some embodiments, rAAV vectors are delivered into human embryonic kidney (HEK) cells (e.g., HEK 293 or HEK 293T cells). In some embodiments, rAAV vectors are delivered into stem cells (e.g., human stem cells) such as, for example, pluripotent stem cells (e.g., human pluripotent stem cells including human induced pluripotent stem cells (hiPSCs)). A stem cell refers to a cell with the ability to divide for indefinite periods in culture and to give rise to specialized cells. A pluripotent stem cell refers to a type of stem cell that is capable of differentiating into all tissues of an organism, but not alone capable of sustaining full organismal development. A human induced pluripotent stem cell refers to a somatic (e.g., mature or adult) cell that has been reprogrammed to an embryonic stem cell-like state by being forced to express genes and factors important for maintaining the defining properties of embryonic stem cells (see, e.g., Takahashi and Yamanaka, Cell 126 (4): 663-76, 2006, incorporated by reference herein). Human induced pluripotent stem cell cells express stem cell markers and are capable of generating cells characteristic of all three germ layers (ectoderm, endoderm, mesoderm).

[1136] Additional non-limiting examples of cell lines that may be used in accordance with the present disclosure include 293-T, 293-T, 3T3, 4T1, 721, 9L, A-549, A172, A20, A253, A2780, A2780ADR, A2780cis, A431, ALC, B16, B35, BCP-1, BEAS-2B, bEnd.3, BHK-21, BR 293, BxPC3, C2C12, C3H-10T1/2, C6, C6/36, Cal-27, CGR8, CHO, CML T1, CMT, COR-L23, COR-L23/5010, COR-L23/CPR, COR-L23/R23, COS-7, COV-434, CT26, D17, DH82, DU145, DuCaP, E14Tg2a, EL4, EM2, EM3, EMT6/AR1, EMT6/AR10.0, FM3, H1299, H69, HB54, HB55, HCA2, Hepa1c1c7, High Five cells, HL-60, HMEC, HT-29, HUVEC, J558L cells, Jurkat, JY cells, K562 cells, KCL22, KG1, Ku812, KYO1, LNCap, Ma-Mel 1, 2, 3 . . . 48, MC-38, MCF-10A, MCF-7, MDA-MB-231, MDA-MB-435, MDA-MB-468, MDCK II, MG63, MONO-MAC 6, MOR/0.2R, MRC5, MTD-1A, MyEnd, NALM-1, NCI-H69/CPR, NCI-H69/LX10, NCI-H69/LX20, NCI-H69/LX4, NIH-3T3, NW-145, OPCN/OPCT Peer, PNT-1A/PNT 2, PTK2, Raji, RBL cells, RenCa, RIN-5F, RMA/RMAS, S2, Saos-2 cells, Sf21, Sf9, SiHa, SKBR3, SKOV-3, T-47D, T2, T84, THP1, U373, U87, U937, VCaP, WM39, WT-49, X63, YAC-1 and YAR cells.

[1137] Some aspects of this disclosure provide cells comprising any of the constructs disclosed herein. In some embodiments, a host cell is transiently or non-transiently transfected with one or more vectors described herein. In some embodiments, a cell is transfected as it naturally occurs in a subject. In some embodiments, a cell that is transfected is taken from a subject. In some embodiments, the cell is derived from cells taken from a subject, such as a cell line. A wide variety of cell lines for tissue culture are known in the art. Examples of cell lines include, but are not limited to, C8161, CCRF-CEM, MOLT, mIMCD-3, NHDF, HeLa-S3, Huhl, Huh4, Huh7, HUVEC, HASMC, HEKn, HEKa, MiaPaCell, Panc1, PC-3, TF1, CTLL-2, C1R, Rat6, CV1, RPTE, A10, T24, J82, A375, ARH-77, Calu1, SW480, SW620, SKOV3, SK-UT, CaCo2, P388D1, SEM-K2, WEHI-231, HB56, TIB55, Jurkat, J45.01, LRMB, Bcl-1, BC-3, IC21, DLD2, Raw264.7, NRK, NRK-52E, MRC5, MEF, Hep G2, HeLa B, HeLa T4, COS, COS-1, COS-6, COS-M6A, BS-C-1 monkey kidney epithelial, BALB/3T3 mouse embryo fibroblast, 3T3 Swiss, 3T3-L1, 132-d5 human fetal fibroblasts; 10.1 mouse fibroblasts, 293-T, 3T3, 721, 9L, A2780, A2780ADR, A2780cis, A 172, A20, A253, A431, A-549, ALC, B16, B35, BCP-1 cells, BEAS-2B, bEnd.3, BHK-21, BR 293. BxPC3. C3H-10T1/2, C6/36, Cal-27, CHO, CHO-7, CHO-IR, CHO-K1, CHO-K2, CHO-T, CHO Dhfr −/−, COR-L23, COR-L23/CPR, COR-L23/5010, COR-L23/R23, COS-7, COV-434, CML T1, CMT, CT26, D17, DH82, DU145, DuCaP, EL4, EM2, EM3, EMT6/AR1, EMT6/AR10.0, FM3, H1299, H69, HB54, HB55, HCA2, HEK-293, HeLa, Hepa1c1c7, HL-60, HMEC, HT-29, Jurkat, JY cells, K562 cells, Ku812, KCL22, KG1, KYO1, LNCap, Ma-Mel 1-48, MC-38, MCF-7, MCF-10A, MDA-MB-231, MDA-MB-468, MDA-MB-435, MDCK II, MDCK 11, MOR/0.2R, MONO-MAC 6, MTD-1A, MyEnd, NCI-H69/CPR, NCI-H69/LX10, NCI-H69/LX20, NCI-H69/LX4, NIH-3T3, NALM-1, NW-145, OPCN/OPCT cell lines, Peer, PNT-1A/PNT 2, RenCa, RIN-5F, RMA/RMAS, Saos-2 cells, Sf-9, SkBr3, T2, T-47D, T84, THP1 cell line, U373, U87, U937, VCaP, Vero cells, WM39, WT-49, X63, YAC-1, YAR, and transgenic varieties thereof.

[1138] Cell lines are available from a variety of sources known to those with skill in the art (see, e.g., the American Type Culture Collection (ATCC) (Manassas, Va.)). In some embodiments, a cell transfected with one or more vectors described herein is used to establish a new cell line comprising one or more vector-derived sequences. In some embodiments, a cell transiently transfected with the components of a CRISPR system as described herein (such as by transient transfection of one or more vectors, or transfection with RNA), and modified through the activity of a CRISPR complex, is used to establish a new cell line comprising cells containing the modification but lacking any other exogenous sequence. In some embodiments, cells transiently or non-transiently transfected with one or more vectors described herein, or cell lines derived from such cells are used in assessing one or more test compounds.

### Vectors

[1139] Some aspects of the present disclosure relate to using recombinant virus vectors (e.g., adeno-associated virus vectors, adenovirus vectors, or herpes simplex virus vectors) for the delivery of the prime editors or components thereof described herein, e.g., the split Cas9 protein or a split nucleobase prime editors, into a cell. In the case of a split-PE approach, the N-terminal portion of a PE fusion protein and the C-terminal portion of a PE fusion are delivered by separate recombinant virus vectors (e.g., adeno-associated virus vectors, adenovirus vectors, or herpes simplex virus vectors) into the same cell, since the full-length Cas9 protein or prime editors exceeds the packaging limit of various virus vectors, e.g., rAAV (˜4.9 kb).

[1140] Thus, in one embodiment, the disclosure contemplates vectors capable of delivering split prime editor fusion proteins, or split components thereof. In some embodiments, a composition for delivering the split Cas9 protein or split prime editor into a cell (e.g., a mammalian cell, a human cell) is provided. In some embodiments, the composition of the present disclosure comprises: (i) a first recombinant adeno-associated virus (rAAV) particle comprising a first nucleotide sequence encoding a N-terminal portion of a Cas9 protein or prime editor fused at its C-terminus to an intein-N; and (ii) a second recombinant adeno-associated virus (rAAV) particle comprising a second nucleotide sequence encoding an intein-C fused to the N-terminus of a C-terminal portion of the Cas9 protein or prime editor. The rAAV particles of the present disclosure comprise a rAAV vector (i.e., a recombinant genome of the rAAV) encapsidated in the viral capsid proteins.

[1141] In some embodiments, the rAAV vector comprises: (1) a heterologous nucleic acid region comprising the first or second nucleotide sequence encoding the N-terminal portion or C-terminal portion of a split Cas9 protein or a split prime editor in any form as described herein, (2) one or more nucleotide sequences comprising a sequence that facilitates expression of the heterologous nucleic acid region (e.g., a promoter), and (3) one or more nucleic acid regions comprising a sequence that facilitate integration of the heterologous nucleic acid region (optionally with the one or more nucleic acid regions comprising a sequence that facilitates expression) into the genome of a cell. In some embodiments, viral sequences that facilitate integration comprise Inverted Terminal Repeat (ITR) sequences. In some embodiments, the first or second nucleotide sequence encoding the N-terminal portion or C-terminal portion of a split Cas9 protein or a split prime editor is flanked on each side by an ITR sequence. In some embodiments, the nucleic acid vector further comprises a region encoding an AAV Rep protein as described herein, either contained within the region flanked by ITRs or outside the region. The ITR sequences can be derived from any AAV serotype (e.g., 1, 2, 3, 4, 5, 6, 7, 8, 9, or 10) or can be derived from more than one serotype. In some embodiments, the ITR sequences are derived from AAV2 or AAV6.

[1142] Thus, in some embodiments, the rAAV particles disclosed herein comprise at least one rAAV2 particle, rAAV6 particle, rAAV8 particle, rPHP.B particle, rPHP.eB particle, or rAAV9 particle, or a variant thereof. In particular embodiments, the disclosed rAAV particles are rPHP.B particles, rPHP.eB particles, rAAV9 particles.

[1143] ITR sequences and plasmids containing ITR sequences are known in the art and commercially available (see, e.g., products and services available from Vector Biolabs, Philadelphia, Pa.; Cellbiolabs, San Diego, Calif.; Agilent Technologies, Santa Clara, Ca; and Addgene, Cambridge, Mass.; and Gene delivery to skeletal muscle results in sustained expression and systemic delivery of a therapeutic protein. Kessler P D, Podsakoff G M, Chen X, McQuiston S A, Colosi P C, Matelis L A, Kurtzman G J, Byrne B J. Proc Natl Acad Sci USA. 1996 Nov. 26; 93(24):14082-7; and Curtis A. Machida. Methods in Molecular Medicine™. Viral Vectors for Gene Therapy Methods and Protocols. 10.1385/1-59259-304-6:201 © Humana Press Inc. 2003. Chapter 10. Targeted Integration by Adeno-Associated Virus. Matthew D. Weitzman, Samuel M. Young Jr., Toni Cathomen and Richard Jude Samulski; U.S. Pat. Nos. 5,139,941 and 5,962,313, all of which are incorporated herein by reference).

[1144] In some embodiments, the rAAV vector of the present disclosure comprises one or more regulatory elements to control the expression of the heterologous nucleic acid region (e.g., promoters, transcriptional terminators, and/or other regulatory elements). In some embodiments, the first and/or second nucleotide sequence is operably linked to one or more (e.g., 1, 2, 3, 4, 5, or more) transcriptional terminators. Non-limiting examples of transcriptional terminators that may be used in accordance with the present disclosure include transcription terminators of the bovine growth hormone gene (bGH), human growth hormone gene (hGH), SV40, CW3, ϕ, or combinations thereof. The efficiencies of several transcriptional terminators have been tested to determine their respective effects in the expression level of the split Cas9 protein or the split prime editor. In some embodiments, the transcriptional terminator used in the present disclosure is a bGH transcriptional terminator. In some embodiments, the rAAV vector further comprises a Woodchuck Hepatitis Virus Posttranscriptional Regulatory Element (WPRE). In certain embodiments, the WPRE is a truncated WPRE sequence, such as “W3.” In some embodiments, the WPRE is inserted 5′ of the transcriptional terminator. Such sequences, when transcribed, create a tertiary structure which enhances expression, in particular, from viral vectors.

[1145] In some embodiments, the vectors used herein may encode the PE fusion proteins, or any of the components thereof (e.g., napDNAbp, linkers, or polymerases). In addition, the vectors used herein may encode the PEgRNAs, and/or the accessory gRNA for second strand nicking. The vectors may be capable of driving expression of one or more coding sequences in a cell. In some embodiments, the cell may be a prokaryotic cell, such as, e.g., a bacterial cell. In some embodiments, the cell may be a eukaryotic cell, such as, e.g., a yeast, plant, insect, or mammalian cell. In some embodiments, the eukaryotic cell may be a mammalian cell. In some embodiments, the eukaryotic cell may be a rodent cell. In some embodiments, the eukaryotic cell may be a human cell. Suitable promoters to drive expression in different types of cells are known in the art. In some embodiments, the promoter may be wild-type. In other embodiments, the promoter may be modified for more efficient or efficacious expression. In yet other embodiments, the promoter may be truncated yet retain its function. For example, the promoter may have a normal size or a reduced size that is suitable for proper packaging of the vector into a virus.

[1146] In some embodiments, the promoters that may be used in the prime editor vectors may be constitutive, inducible, or tissue-specific. In some embodiments, the promoters may be a constitutive promoters. Non-limiting exemplary constitutive promoters include cytomegalovirus immediate early promoter (CMV), simian virus (SV40) promoter, adenovirus major late (MLP) promoter, Rous sarcoma virus (RSV) promoter, mouse mammary tumor virus (MMTV) promoter, phosphoglycerate kinase (PGK) promoter, elongation factor-alpha (EFla) promoter, ubiquitin promoters, actin promoters, tubulin promoters, immunoglobulin promoters, a functional fragment thereof, or a combination of any of the foregoing. In some embodiments, the promoter may be a CMV promoter. In some embodiments, the promoter may be a truncated CMV promoter. In other embodiments, the promoter may be an EFla promoter. In some embodiments, the promoter may be an inducible promoter. Non-limiting exemplary inducible promoters include those inducible by heat shock, light, chemicals, peptides, metals, steroids, antibiotics, or alcohol. In some embodiments, the inducible promoter may be one that has a low basal (non-induced) expression level, such as, e.g., the Tet-On® promoter (Clontech). In some embodiments, the promoter may be a tissue-specific promoter. In some embodiments, the tissue-specific promoter is exclusively or predominantly expressed in liver tissue. Non-limiting exemplary tissue-specific promoters include B29 promoter, CD14 promoter, CD43 promoter, CD45 promoter, CD68 promoter, desmin promoter, elastase-1 promoter, endoglin promoter, fibronectin promoter, Flt-1 promoter, GFAP promoter, GPIIb promoter, ICAM-2 promoter, INF-P promoter, Mb promoter, Nphsl promoter, OG-2 promoter, SP-B promoter, SYN1 promoter, and WASP promoter.

[1147] In some embodiments, the prime editor vectors (e.g., including any vectors encoding the prime editor fusion protein and/or the PEgRNAs, and/or the accessory second strand nicking gRNAs) may comprise inducible promoters to start expression only after it is delivered to a target cell. Non-limiting exemplary inducible promoters include those inducible by heat shock, light, chemicals, peptides, metals, steroids, antibiotics, or alcohol. In some embodiments, the inducible promoter may be one that has a low basal (non-induced) expression level, such as, e.g., the Tet-On® promoter (Clontech).

[1148] In additional embodiments, the prime editor vectors (e.g., including any vectors encoding the prime editor fusion protein and/or the PEgRNAs, and/or the accessory second strand nicking gRNAs) may comprise tissue-specific promoters to start expression only after it is delivered into a specific tissue. Non-limiting exemplary tissue-specific promoters include B29 promoter, CD14 promoter, CD43 promoter, CD45 promoter, CD68 promoter, desmin promoter, elastase-1 promoter, endoglin promoter, fibronectin promoter, Flt-1 promoter, GFAP promoter, GPIIb promoter, ICAM-2 promoter, INF-P promoter, Mb promoter, Nphsl promoter, OG-2 promoter, SP-B promoter, SYN1 promoter, and WASP promoter.

[1149] In some embodiments, the nucleotide sequence encoding the PEgRNA (or any guide RNAs used in connection with prime editing) may be operably linked to at least one transcriptional or translational control sequence. In some embodiments, the nucleotide sequence encoding the guide RNA may be operably linked to at least one promoter. In some embodiments, the promoter may be recognized by RNA polymerase III (Pol III). Non-limiting examples of Pol III promoters include U6, HI and tRNA promoters. In some embodiments, the nucleotide sequence encoding the guide RNA may be operably linked to a mouse or human U6 promoter. In other embodiments, the nucleotide sequence encoding the guide RNA may be operably linked to a mouse or human HI promoter. In some embodiments, the nucleotide sequence encoding the guide RNA may be operably linked to a mouse or human tRNA promoter. In embodiments with more than one guide RNA, the promoters used to drive expression may be the same or different. In some embodiments, the nucleotide encoding the crRNA of the guide RNA and the nucleotide encoding the tracr RNA of the guide RNA may be provided on the same vector. In some embodiments, the nucleotide encoding the crRNA and the nucleotide encoding the tracr RNA may be driven by the same promoter. In some embodiments, the crRNA and tracr RNA may be transcribed into a single transcript. For example, the crRNA and tracr RNA may be processed from the single transcript to form a double-molecule guide RNA. Alternatively, the crRNA and tracr RNA may be transcribed into a single-molecule guide RNA.

[1150] In some embodiments, the nucleotide sequence encoding the guide RNA may be located on the same vector comprising the nucleotide sequence encoding the PE fusion protein. In some embodiments, expression of the guide RNA and of the PE fusion protein may be driven by their corresponding promoters. In some embodiments, expression of the guide RNA may be driven by the same promoter that drives expression of the PE fusion protein. In some embodiments, the guide RNA and the PE fusion protein transcript may be contained within a single transcript. For example, the guide RNA may be within an untranslated region (UTR) of the Cas9 protein transcript. In some embodiments, the guide RNA may be within the 5′ UTR of the PE fusion protein transcript. In other embodiments, the guide RNA may be within the 3′ UTR of the PE fusion protein transcript. In some embodiments, the intracellular half-life of the PE fusion protein transcript may be reduced by containing the guide RNA within its 3′ UTR and thereby shortening the length of its 3′ UTR. In additional embodiments, the guide RNA may be within an intron of the PE fusion protein transcript. In some embodiments, suitable splice sites may be added at the intron within which the guide RNA is located such that the guide RNA is properly spliced out of the transcript. In some embodiments, expression of the Cas9 protein and the guide RNA in close proximity on the same vector may facilitate more efficient formation of the CRISPR complex.

[1151] The prime editor vector system may comprise one vector, or two vectors, or three vectors, or four vectors, or five vector, or more. In some embodiments, the vector system may comprise one single vector, which encodes both the PE fusion protein and PEgRNA. In other embodiments, the vector system may comprise two vectors, wherein one vector encodes the PE fusion protein and the other encodes the PEgRNA. In additional embodiments, the vector system may comprise three vectors, wherein the third vector encodes the second strand nicking gRNA used in the herein methods.

[1152] In some embodiments, the composition comprising the rAAV particle (in any form contemplated herein) further comprises a pharmaceutically acceptable carrier. In some embodiments, the composition is formulated in appropriate pharmaceutical vehicles for administration to human or animal subjects.

[1153] Some examples of materials which can serve as pharmaceutically-acceptable carriers include: (1) sugars, such as lactose, glucose and sucrose; (2) starches, such as corn starch and potato starch; (3) cellulose, and its derivatives, such as sodium carboxymethyl cellulose, methylcellulose, ethyl cellulose, microcrystalline cellulose and cellulose acetate; (4) powdered tragacanth; (5) malt; (6) gelatin; (7) lubricating agents, such as magnesium stearate, sodium lauryl sulfate and talc; (8) excipients, such as cocoa butter and suppository waxes; (9) oils, such as peanut oil, cottonseed oil, safflower oil, sesame oil, olive oil, corn oil and soybean oil; (10) glycols, such as propylene glycol; (11) polyols, such as glycerin, sorbitol, mannitol and polyethylene glycol (PEG); (12) esters, such as ethyl oleate and ethyl laurate; (13) agar; (14) buffering agents, such as magnesium hydroxide and aluminum hydroxide; (15) alginic acid; (16) pyrogen-free water; (17) isotonic saline; (18) Ringer's solution; (19) ethyl alcohol; (20) pH buffered solutions; (21) polyesters, polycarbonates and/or polyanhydrides; (22) bulking agents, such as polypeptides and amino acids (23) serum component, such as serum albumin, HDL and LDL; (22) C2-C12 alcohols, such as ethanol; and (23) other non-toxic compatible substances employed in pharmaceutical formulations. Wetting agents, coloring agents, release agents, coating agents, sweetening agents, flavoring agents, perfuming agents, preservative and antioxidants can also be present in the formulation. The terms such as “excipient”, “carrier”, “pharmaceutically acceptable carrier” or the like are used interchangeably herein.

### Delivery Methods

[1154] In some aspects, the invention provides methods comprising delivering one or more polynucleotides, such as or one or more vectors as described herein, one or more transcripts thereof, and/or one or proteins transcribed therefrom, to a host cell. In some aspects, the invention further provides cells produced by such methods, and organisms (such as animals, plants, or fungi) comprising or produced from such cells. In some embodiments, a base editor as described herein in combination with (and optionally complexed with) a guide sequence is delivered to a cell.

[1155] Exemplary delivery strategies are described herein elsewhere, which include vector-based strategies, PE ribonucleoprotein complex delivery, and delivery of PE by mRNA methods.

[1156] In some embodiments, the method of delivery provided comprises nucleofection, microinjection, biolistics, virosomes, liposomes, immunoliposomes, polycation or lipid:nucleic acid conjugates, naked DNA, artificial virions, and agent-enhanced uptake of DNA.

[1157] Exemplary methods of delivery of nucleic acids include lipofection, nucleofection, electroporation, stable genome integration (e.g., piggyback), microinjection, biolistics, virosomes, liposomes, immunoliposomes, polycation or lipid:nucleic acid conjugates, naked DNA, artificial virions, and agent-enhanced uptake of DNA. Lipofection is described in e.g., U.S. Pat. Nos. 5,049,386, 4,946,787; and 4,897,355) and lipofection reagents are sold commercially (e.g., Transfectam™, Lipofectin™ and SF Cell Line 4D-Nucleofector X Kit™ (Lonza)). Cationic and neutral lipids that are suitable for efficient receptor-recognition lipofection of polynucleotides include those of Feigner, WO 91/17424; WO 91/16024. Delivery may be to cells (e.g. in vitro or ex vivo administration) or target tissues (e.g. in vivo administration). Delivery may be achieved through the use of RNP complexes.

[1158] The preparation of lipid:nucleic acid complexes, including targeted liposomes such as immunolipid complexes, is well known to one of skill in the art (see, e.g., Crystal, Science 270:404-410 (1995); Blaese et al., Cancer Gene Ther. 2:291-297 (1995); Behr et al., Bioconjugate Chem. 5:382-389 (1994); Remy et al., Bioconjugate Chem. 5:647-654 (1994); Gao et al., Gene Therapy 2:710-722 (1995); Ahmad et al., Cancer Res. 52:4817-4820 (1992); U.S. Pat. Nos. 4,186,183, 4,217,344, 4,235,871, 4,261,975, 4,485,054, 4,501,728, 4,774,085, 4,837,028, and 4,946,787).

[1159] In other embodiments, the method of delivery and vector provided herein is an RNP complex. RNP delivery of fusion proteins markedly increases the DNA specificity of base editing. RNP delivery of fusion proteins leads to decoupling of on- and off-target DNA editing. RNP delivery ablates off-target editing at non-repetitive sites while maintaining on-target editing comparable to plasmid delivery, and greatly reduces off-target DNA editing even at the highly repetitive VEGFA site 2. See Rees, H. A. et al., Improving the DNA specificity and applicability of base editing through protein engineering and protein delivery, Nat. Commun. 8, 15790 (2017), U.S. Pat. No. 9,526,784, issued Dec. 27, 2016, and U.S. Pat. No. 9,737,604, issued Aug. 22, 2017, each of which is incorporated by reference herein.

[1160] Additional methods for the delivery of nucleic acids to cells are known to those skilled in the art. See, for example, US 2003/0087817, incorporated herein by reference.

[1161] Other aspects of the present disclosure provide methods of delivering the prime editor constructs into a cell to form a complete and functional prime editor within a cell. For example, in some embodiments, a cell is contacted with a composition described herein (e.g., compositions comprising nucleotide sequences encoding the split Cas9 or the split prime editor or AAV particles containing nucleic acid vectors comprising such nucleotide sequences). In some embodiments, the contacting results in the delivery of such nucleotide sequences into a cell, wherein the N-terminal portion of the Cas9 protein or the prime editor and the C-terminal portion of the Cas9 protein or the prime editor are expressed in the cell and are joined to form a complete Cas9 protein or a complete prime editor.

[1162] It should be appreciated that any rAAV particle, nucleic acid molecule or composition provided herein may be introduced into the cell in any suitable way, either stably or transiently. In some embodiments, the disclosed proteins may be transfected into the cell. In some embodiments, the cell may be transduced or transfected with a nucleic acid molecule. For example, a cell may be transduced (e.g., with a virus encoding a split protein), or transfected (e.g., with a plasmid encoding a split protein) with a nucleic acid molecule that encodes a split protein, or an rAAV particle containing a viral genome encoding one or more nucleic acid molecules. Such transduction may be a stable or transient transduction. In some embodiments, cells expressing a split protein or containing a split protein may be transduced or transfected with one or more guide RNA sequences, for example in delivery of a split Cas9 (e.g., nCas9) protein. In some embodiments, a plasmid expressing a split protein may be introduced into cells through electroporation, transient (e.g., lipofection) and stable genome integration (e.g., piggyback) and viral transduction or other methods known to those of skill in the art.

[1163] In certain embodiments, the compositions provided herein comprise a lipid and/or polymer. In certain embodiments, the lipid and/or polymer is cationic. The preparation of such lipid particles is well known. See, e.g. U.S. Pat. Nos. 4,880,635; 4,906,477; 4,911,928; 4,917,951; 4,920,016; 4,921,757; and 9,737,604, each of which is incorporated herein by reference.

[1164] The guide RNA sequence may be 15-100 nucleotides in length and comprise a sequence of at least 10, at least 15, or at least 20 contiguous nucleotides that is complementary to a target nucleotide sequence. The guide RNA may comprise a sequence of 15, 16, 17, 18, 19, 20, 21, 22, 23, 24, 25, 26, 27, 28, 29, 30, 31, 32, 33, 34, 35, 36, 37, 38, 39, or 40 contiguous nucleotides that is complementary to a target nucleotide sequence. The guide RNA may be 15, 16, 17, 18, 19, 20, 21, 22, 23, 24, 25, 26, 27, 28, 29, 30, 31, 32, 33, 34, 35, 36, 37, 38, 39, 40, 41, 42, 43, 44, 45, 46, 47, 48, 49, or 50 nucleotides in length.

[1165] In some embodiments, the target nucleotide sequence is a DNA sequence in a genome, e.g. a eukaryotic genome. In certain embodiments, the target nucleotide sequence is in a mammalian (e.g. a human) genome.

[1166] The compositions of this disclosure may be administered or packaged as a unit dose, for example. The term “unit dose” when used in reference to a pharmaceutical composition of the present disclosure refers to physically discrete units suitable as unitary dosage for the subject, each unit containing a predetermined quantity of active material calculated to produce the desired therapeutic effect in association with the required diluent, i.e., a carrier or vehicle.

[1167] Treatment of a disease or disorder includes delaying the development or progression of the disease, or reducing disease severity. Treating the disease does not necessarily require curative results.

[1168] As used therein, “delaying” the development of a disease means to defer, hinder, slow, retard, stabilize, and/or postpone progression of the disease. This delay can be of varying lengths of time, depending on the history of the disease and/or individuals being treated. A method that “delays” or alleviates the development of a disease, or delays the onset of the disease, is a method that reduces probability of developing one or more symptoms of the disease in a given time frame and/or reduces extent of the symptoms in a given time frame, when compared to not using the method. Such comparisons are typically based on clinical studies, using a number of subjects sufficient to give a statistically significant result.

[1169] “Development” or “progression” of a disease means initial manifestations and/or ensuing progression of the disease. Development of the disease can be detectable and assessed using standard clinical techniques as well known in the art. However, development also refers to progression that may be undetectable. For purpose of this disclosure, development or progression refers to the biological course of the symptoms. “Development” includes occurrence, recurrence, and onset.

[1170] As used herein “onset” or “occurrence” of a disease includes initial onset and/or recurrence. Conventional methods, known to those of ordinary skill in the art of medicine, can be used to administer the isolated polypeptide or pharmaceutical composition to the subject, depending upon the type of disease to be treated or the site of the disease.

[1171] Without further elaboration, it is believed that one skilled in the art can, based on the above description, utilize the present disclosure to its fullest extent. The following specific embodiments are, therefore, to be construed as merely illustrative, and not limitative of the remainder of the disclosure in any way whatsoever. All publications cited herein are incorporated by reference for the purposes or subject matter referenced herein.

### EXAMPLES

### Example 1. Prime Editing (PE) for Installing Precise Nucleotide Changes in the Genome

[1172] The objective is to develop a transformative genome editing technology for precise and general installation of single nucleotide changes in mammalian genomes. This technology would allow investigators to study the effects of single nucleotide variations in virtually any mammalian gene, and potentially enable therapeutic interventions for correcting pathogenic point mutations in human patients.

[1173] Adoption of the clustered regularly interspaced short palindromic repeat (CRISPR) system for genome editing has revolutionized the life sciences¹⁻³. Although gene disruption using CRISPR is now routine, the precise installation of single nucleotide edits remains a major challenge, despite being necessary for studying or correcting a large number of disease-causative mutations. Homology directed repair (HDR) is capable of achieving such edits, but suffers from low efficiency (often <5%), a requirement for donor DNA repair templates, and deleterious effects of double-stranded DNA break (DSB) formation. Recently, the Liu laboratory developed base editing, which achieves efficient single nucleotide editing without DSBs. Base editors (BEs) combine the CRISPR system with base-modifying deaminase enzymes to convert target C⋅G or A⋅T base pairs to A⋅T or G⋅C, respectively⁴⁻⁶. Although already widely used by researchers worldwide (>5,000 Liu lab BE constructs distributed by Addgene), current BEs enable only four of the twelve possible base pair conversions and are unable to correct small insertions or deletions. Moreover, the targeting scope of base editing is limited by the editing of non-target C or A bases adjacent to the target base (“bystander editing”) and by the requirement that a PAM sequence exist 15±2 bp from the target base. Overcoming these limitations would therefore greatly broaden the basic research and therapeutic applications of genome editing.

[1174] Here, it is proposed to develop a new precision editing approach that offers many of the benefits of base editing-namely, avoidance of double strand breaks and donor DNA repair templates—while overcoming its major limitations. To achieve this ambitious goal, it is aimed to directly install edited DNA strands at target genomic sites using target-primed reverse transcription (TPRT). In the design discussed herein, CRISPR guide RNA (gRNA) will be engineered to carry a template encoding mutagenic DNA strand synthesis, to be executed by an associated reverse transcriptase (RT) enzyme. The CRISPR nuclease (Cas9)-nicked target site DNA will serve as the primer for reverse transcription, allowing for direct incorporation of any desired nucleotide edit.

### Section 1

[1175] Establish guide RNA-templated reverse transcription of mutagenic DNA strands. Prior studies have shown that, following DNA cleavage but prior to complex dissociation, Cas9 releases the non-target DNA strand to expose a free 3′ terminus. It is hypothesized that this DNA strand is accessible to extension by polymerase enzymes, and that gRNAs can be engineered through extension of their 5′ or 3′ terminus to serve as templates for DNA synthesis. In preliminary in vitro studies, it was established that nicked DNA strands within Cas9:gRNA-bound complexes can indeed prime reverse transcription using the bound gRNA as a template (RT enzyme in trans). Next, different gRNA linkers, primer binding sites, and synthesis templates will be explored to determine optimal design rules in vitro. Then, different RT enzymes, acting in trans or as fusions to Cas9, will be evaluated in vitro. Finally, engineered gRNA designs will be identified that retain efficient binding and cutting activity in cells. Successful demonstration of this aim will provide a foundation for carrying out mutagenic strand synthesis in cells.

### Section 2

[1176] Establish prime editing in human cells. Based on DNA processing and repair mechanisms, it is hypothesized that mutagenic DNA strands (single stranded flaps) can be used to direct specific and efficient editing of target nucleotides. In encouraging preliminary studies, feasibility for this strategy was established by demonstrating editing with model plasmid substrates containing mutagenic flaps. Concurrent with Aim 1, repair outcomes will be further evaluated by systematically varying the mutagenic flap's length, sequence composition, target nucleotide identity, and 3′ terminus. Small 1 to 3 nucleotide insertions and deletions will also be tested. In parallel, and building from Aim 1, Cas9-RT architectures will be evaluated, including fusion proteins and non-covalent recruitment strategies. Cas9-RT architectures and extended gRNAs will be assayed for cellular editing at multiple target sites in the human genome, and will then be optimized for high efficiency. If successful, this aim would immediately establish TPRT genome editing (i.e., prime editing) for basic science applications.

### Section 3

[1177] Achieve site-specific editing of pathogenic mutations in cultured human cells. The potential generality of this technology could enable editing of transversion mutations and indels that are not currently correctable by BEs. Guided by the results of Aim 1 and Aim 2, pathogenic transversion mutations will be targeted in cultured human cells, including the sickle cell disease founder mutation in beta globin (requires an A⋅T to T⋅A transversion to correct) and the most prevalent Wilson's disease mutation in ATP7B (requires a G⋅C to T⋅A transversion to correct). The correction of small insertion and deletion mutations will also be examined, including the 3-nucleotide AF508 deletion in CFTR that causes cystic fibrosis. If successful, this would lay the foundation for developing powerful therapeutic approaches that address these important human diseases.

### Approach

[1178] The objective is to develop a genome editing strategy that directly installs point mutations at targeted genomic sites. In the technology development phase, efforts will focus on protein and RNA engineering to incorporate TPRT functionality into the CRISPR/Cas system. In vitro assays will be used to carefully probe the function of each step of TPRT, building from the ground up (Aim 1). The second focus area will evaluate editing outcomes in mammalian cells using a combination of model substrates and engineered CRISPR/Cas systems (Aim 2). Finally, the application phase will use the technology to correct mutations that have been intractable to genome editing by other methods (Aim 3).

[1179] The general editing design is shown in FIGS. 1A-1B. Cas9 nickases contain inactivating mutations to the HNH nuclease domain (Spy Cas9 H840A or N863A), restricting DNA cleavage to the PAM containing strand (non-target strand). Guide RNAs (gRNAs) are engineered to contain a template for reverse transcription (designs detailed on slide 5). Shown is a 5′ extension of the gRNA, but 3′ extensions can also be implemented. The Cas9 nickase is fused to a reverse transcriptase (RT) enzyme, either through the C-terminus or N-terminus. The gRNA:Cas9-RT complex targets the DNA region of interest and forms an R loop after displacing the non-target strand. Cas9 nicks the non-target DNA strand. Release of the nicked strand exposes a free 3′-OH terminus that is competent to prime reverse transcription using the extended gRNA as a template. This DNA synthesis reaction is carried out by the fused RT enzyme. The gRNA template encodes a DNA sequence that is homologous to the original DNA duplex, with the exception of the nucleotide that is targeted for editing. The product of reverse transcription is a single stranded DNA flap that encodes the desired edit. This flap, which contains a free 3′ terminus, can equilibrate with the adjacent DNA strand, resulting in a 5′ flap species. The latter species is hypothesized to serve as an efficient substrate for FEN1 (flap endonuclease 1), an enzyme that naturally excises 5′ flaps from Okazaki fragments during lagging strand DNA synthesis, and removes 5′ flaps following strand displacement synthesis that occurs during long-patch base excision repair. Ligation of the nicked DNA produces a mismatched base pair. This intermediate could either undergo reversion to the original base pair or conversion to the desired edited base pair via mismatch repair (MMR) processes. Alternatively, semiconservative DNA replication could give rise to one copy each of the reversion and edit.

### 1. Establish Guide RNA-Templated Reverse Transcription of Mutagenic DNA Strands.

### Background and Rationale

[1180] In the proposed genome editing strategy, the Cas9-nicked non-target DNA strand (PAM-containing strand that forms the R-loop) acts as the primer for DNA synthesis. It is hypothesized that this is possible based on several pieces of biochemical and structural data. Nuclease protection experiments³², crystallographic studies³³, and base editing windows^{4,24} have demonstrated a large degree of flexibility and disorder for the non-target strand nucleotides ˜20 through −10 within the so-called R-loop of the Cas9-bound complex (numbering indicates distance 5′ from first PAM nucleotide). Moreover, the PAM-distal portion of the cleaved non-target strand can be displaced from tightly bound ternary complexes when complementary ssDNA is added in trans²⁰. These studies support that the non-target strand is highly flexible, is accessible to enzymes, and that after nicking, the 3′ terminus of the PAM-distal fragment is released prior to Cas9 dissociation. Furthermore, it is hypothesized that gRNAs can be extended to template DNA synthesis. Prior studies have shown that gRNAs for SpCas9, SaCas9, and LbCas12a (formerly Cpf1) tolerate gRNA extensions with RNA aptamers³⁴, ligand-inducible self-cleaving ribozymes³⁵, and long non-coding RNAs³⁶. This literature establishes precedent for two major features that will be exploited. In assessing this strategy, several CRISPR-Cas systems will be evaluated in conjunction with 5′ and 3′ extended gRNA designs using a combination of in vitro and cellular assays (FIGS. 2A-2C).

[1181] Designs for engineered gRNAs for TRT editing are shown in FIGS. 3A-3B. DNA synthesis proceeds 5′ to 3′, and thus copies the RNA template in the 3′ to 5′ direction. The design for the 5′ extension contains a linker region, a primer binding site where the nicked DNA strand anneals, and a template for DNA synthesis by reverse transcription. The 3′ extended gRNA contains a primer binding site and a reverse transcription template. In some cases, the 3′ RNA hairpin of the gRNA core is modified to match the DNA target sequence, as in vitro experiments showed that reverse transcription extends 3 nucleotides into the gRNA core for the 3′ extended gRNA constructs (modification of the hairpin sequence appears well tolerated so long as compensatory changes are made that maintain the hairpin RNA structure). DNA synthesis proceed 5′ to 3′, with nucleotides added to the 3′ OH of the growing DNA strand.

[1182] Preliminary Results

[1183] Cas9 nicked DNA primes reverse transcription of gRNA templates. To evaluate the accessibility of the nicked non-target DNA strand, in vitro biochemical assays were performed using the Cas9 nuclease from S. pyogenes (SpCas9) and Cy5 fluorescently labeled duplex DNA substrates (51 base pairs). First, a series of gRNAs containing 5′ extensions with varying synthesis template lengths were prepared by in vitro transcription (overall design shown in FIG. 2B). Electrophoretic mobility shift assays (EMSA) with nuclease dead Cas9 (dCas9) established that 5′ extended gRNAs maintain target binding affinity (data not shown). Next, TPRT activity was tested on pre-nicked Cy5-labeled duplex DNA substrates using dCas9, 5′-extended gRNAs, and Molony-Murine Leukemia Virus (M-MLV) reverse transcriptase (Superscript III). After 1 hour of incubation at 37° C., products were evaluated by denaturing polyacrylamide gel electrophoresis (PAGE) and imaged using Cy5 fluorescence (FIG. 4A). Each 5′-extended gRNA variant led to significant product formation, with the observed DNA product sizes being consistent with the length of the extension template (FIG. 4B). Importantly, in the absence of dCas9, pre-nicked substrates were extended to the full 51-bp length of the DNA substrate, strongly suggesting that the complementary DNA strand, and not the gRNA, was used as the template for DNA synthesis when dCas9 was not present (FIG. 4C). Of note, the system was designed such that the newly synthesized DNA strand mirrors the product that would be required for target site editing (a homologous strand with a single nucleotide change). This result establishes that Cas9:gRNA binding exposes the nicked non-target strand's 3′ end, and that the non-target strand is accessible to reverse transcription.

[1184] Next, non-nicked dsDNA substrates were evaluated using the Cas9(H840A) mutant, which nicks the non-target DNA strand. First, to test Cas9(H840A) nickase activity with 5′-extended gRNAs, in vitro cleavage assays were performed as previously described³⁷. Although nicking was impaired by comparison to the standard gRNA, appreciable cleavage products were formed (FIG. 4D). Importantly, RT products were also observed when TPRT reactions were carried out with 5′-extended gRNAs and Cas9(H840A), albeit at lower yields that are likely explained by the decreased nicking activity (FIG. 4D). This result establishes that 5′-extended gRNA:Cas9(H840A) complexes can nick DNA and template reverse transcription.

[1185] Finally, 3′ gRNA extensions were evaluated for Cas9(H840A) nicking and TPRT. By comparison to 5′-extended gRNAs, DNA cleavage by 3′-extended gRNAs was not impaired to any detectable extent compared to the standard gRNA. Significantly, 3′-extended gRNA templates also supported efficient reverse transcription with both pre-nicked and intact duplex DNA substrates when M-MLV RT was supplied in trans (FIG. 4E). Surprisingly, only a single product was observed for 3′-extended templates, indicating that reverse transcription terminates at a specific location along the gRNA scaffold. Homopolymer tailing of the product with terminal transferase followed by Klenow extension and Sanger sequencing revealed that the full gRNA synthesis template was copied in addition to the terminal 3 nucleotides of the gRNA core. In the future, the flap terminus will be reprogrammed by modifying the terminal gRNA sequence^{38,39}. This result demonstrates that 3′-extended gRNAs can serve as efficient nuclease targeting guides and can template reverse transcription.

[1186] Cas9-TPRT uses nicked DNA and gRNA in cis. Dual color experiments were used to determine if the RT reaction preferentially occurs with the gRNA in cis (bound in the same complex) (see FIG. 8). Two separate experiments were conducted for 5′-extended and 3′-extended gRNAs. For a given experiment, ternary complexes of dCas9, gRNA, and DNA substrate were formed in separate tubes. In one tube, the gRNA encodes a long RT product and the DNA substrate is labeled with Cy3 (red); in the other, the gRNA encodes a short RT product and the DNA substrate is labeled with Cy5 (blue). After short incubations, the complexes were mixed and then treated with RT enzyme and dNTPs. Products were separated by urea-denaturing PAGE and visualized by fluorescence in the Cy3 and Cy5 channels. Reaction products were found to preferentially form using the gRNA template that was pre-complexed with the DNA substrate, indicating that the RT reaction likely can occur in cis. This results supports that a single Cas9:gRNA complex can target a DNA site and template reverse transcription of a mutagenic DNA strand.

Testing TPRT with Other Cas Systems

[1187] Similar experiments to those presented in the previous sections will be carried out using other Cas systems, including Cas9 from S. aureus and Cas12a from L. bacterium (see FIGS. 2A-2C). If TRPT can also be demonstrated for these Cas variants, the potential editing scope and likelihood of overall success in cells would increase.

Testing TPRT with RT-Cas9 Fusion Proteins

[1188] A series of commercially available or purifiable RT enzymes will first be evaluated in trans for TPRT activity. In addition to the already tested RT from M-MLV, the RT from Avian Myeloblastosis Virus (AMV), the Geobacillus stearothermophilus Group II Intron (GsI-IIC)^{41,42}, and the Eubacterium rectale group II intron (Eu.re.I2)^{43,44} will be evaluated. Significantly, the latter two RTs perform TPRT in their natural biological contexts. Where relevant, RNAse inactivating mutations and other potentially beneficial RT enzyme modifications will be tested. Once functional RTs are identified when supplied in trans, each will be evaluated as a fusion protein to Cas9 variants. Both N-terminus and C-terminus fusion orientations will be tested, along with various linker lengths and architectures. Kinetic time course experiments will be used to determine whether TPRT can occur using the RT enzyme in cis. If an RT-Cas9 fusion architecture can be constructed that allows for efficient TPRT chemistry, this will greatly increase the likelihood of functional editing in the context of a cell.

Cas9 Targeting with Engineered gRNAs in Cells

[1189] Candidate engineered gRNAs developed in the previous sub-aims will be evaluated in human cell culture experiments (HEK293) to confirm Cas9 targeting efficiency. Using established indel formation assays employing wild type SpCas9⁴⁵, engineered gRNAs will be compared side-by-side with standard gRNAs across 5 or more sites in the human genome. Genome editing efficiency will be characterized by amplicon sequencing in multiplex using the Illumina MiSeq platform housed in the laboratory. It is anticipated that results from this and the preceding sections will generate insights that inform subsequent iterations of the design-build-test cycle, where gRNAs can be optimized for both templating reverse transcription and efficient Cas9 targeting in cells.

[1190] Results of in vitro validations are shown in FIGS. 5-7. In vitro experiments demonstrated that the nicked non-target DNA strand is flexible and available for priming DNA synthesis, and that the gRNA extension can serve as a template for reverse transcription (see FIG. 5). This set of experiments used 5′-extended gRNAs (designed as shown in FIGS. 3A-3B) with varying length synthesis templates (listed to the left). Fluorescently labeled (Cy5) DNA targets were used as substrates, and were pre-nicked in this set of experiments. The Cas9 used in these experiments is catalytically dead Cas9 (dCas9), so cannot cut DNA but can still bind efficiently. Superscript III, a commercial RT derived from the Moloney-Murine Leukemia Virus (M-MLV), was supplied in trans. First, dCas9:gRNA complexes were formed from purified components. Then, the fluorescently labeled DNA substrate was added along with dNTPs and the RT enzyme. After 1 hour of incubation at 37 C, the reaction products were analyzed by denaturing urea-polyacrylamide gel electrophoresis (PAGE). The gel image shows extension of the original DNA strand to lengths that are consistent with the length of the reverse transcription template. Of note, reactions carried out in the absence of dCas9 produced DNA products of length 51 nucleotides, regardless of the gRNA used. This product corresponds to use of the complementary DNA strand as the template for DNA synthesis and not the RNA (data not shown). Thus, Cas9 binding is required for directing DNA synthesis to the RNA template. This set of in vitro experiments closely parallels those shown in FIG. 5, except that the DNA substrate is not pre-nicked, and a Cas9 nickase (SpyCas9 H840A mutant) is used. As shown in the gel, the nickase efficiently cleaves the DNA strand when the standard gRNA is used (gRNA_0, lane 3). Multiple cleavage products are observed, consistent with prior biochemical studies of SpyCas9. The 5′ extension impairs nicking activity (lanes 4-8), but some RT product is still observed. FIG. 7 shows that 3′ extensions support DNA synthesis and do not significantly effect Cas9 nickase activity. Pre-nicked substrates (black arrow) are near-quantitatively converted to RT products when either dCas9 or Cas9 nickase is used (lanes 4 and 5). Greater than 50% conversion to the RT product (red arrow) is observed with full substrates (lane 3). To determine the length and sequence of the RT product, the product band was excised from the gel, extracted, and sequenced. This revealed that RT extended 3 nucleotides into the gRNA core's 3′ terminal hairpin. Subsequent experiments (not shown) demonstrated that these three nucleotides could be changed to match target DNA sequences, so long as complementary changes were made that maintain the hairpin RNA structure.

### Potential Difficulties and Alternatives

[1191] (1) RT does not function as a fusion: molecular crowding and/or unfavorable geometries could encumber polymerase extension by Cas9-fused RT enzymes. First, linker optimization can be tested. Circularly permutated variants of Cas9, which could re-orient the spatial relationship between the DNA primer, gRNA, and RT enzyme, will be evaluated. Non-covalent RT recruitment strategies as detailed in Aim 2 can be tested. (2) Decreased Cas targeting efficiency by extended gRNA variants: this is most likely to be an issue for 5′-extended gRNAs. Based on structural data²⁴, Cas9 mutants can be designed and screened to identify variants with greater tolerance to gRNA extension. In addition, gRNA libraries could be screened in cells for linkers that improve targeting activity.

[1192] Significance

[1193] These preliminary results establish that Cas9 nickases and extended gRNAs can initiate target-primed reverse transcription on bound DNA targets using a reverse transcriptase supplied in trans. Importantly, Cas9 binding was found to be critically important for product formation. Though perhaps not an absolute requirement for genome editing in cells, further development of the system that incorporates RT enzyme function in cis would significantly increase the likelihood of success in cell-based applications. Achievement of the remaining aspects of this Aim would provide a molecular foundation for carrying out precision genome editing in the context of the human genome.

### 2. Establish Prime Editing in Human Cells.

### Background and Rationale

[1194] In the proposed strategy, an engineered RT-Cas9:gRNA complex will introduce mutagenic 3′ DNA flaps at genomic target sites. It is hypothesized that mutagenic 3′ flaps containing a single mismatch will be incorporated by the DNA repair machinery through energetically accessible equilibration with adjacent 5′ flaps, which would be preferentially removed (FIGS. 1C-1D). The DNA replication and repair machineries encounter 5′ ssDNA flaps when processing Okazaki fragments⁴⁶ and during long-patch base excision repair (LP-BER)⁴⁷. 5′ flaps are the preferred substrates for the widely expressed flap endonuclease FEN1, which is recruited to DNA repair sites by the homotrimeric sliding clamp complex PCNA⁴⁸. PCNA also serves as a scaffold for simultaneous recruitment of other repair factors including the DNA ligase Lig1⁴⁹. Acting as a ‘toolbelt’, PCNA accelerates serial flap cleavage and ligation, which is essential to processing the millions of Okazaki fragments generated during every cell division.^{50,51}. Based on resemblance to these natural DNA intermediates, it is hypothesized that mutagenic strands would be incorporated through equilibration with 5′ flaps, followed by coordinated 5′ flap excision and ligation. Mismatch repair (MMR) should then occur on either strand with equal probability, leading to editing or reversion (FIGS. 1C-1D). Alternatively, DNA replication could occur first and lead directly to the incorporation of the edit in the newly synthesized daughter strand. While the highest expected yield from this process is 50%, multiple substrate editing attempts could drive the reaction toward completion due to the irreversibility of editing repair.

[1195] Preliminary Result

[1196] DNA flaps induce site-specific mutagenesis in plasmid model substrates in yeast and HEK cells. To test the proposed editing strategy, studies were initiated with model plasmid substrates containing mutagenic 3′ flaps that resemble the product of TPRT. A dual fluorescent protein reporter was created that encodes a stop codon between GFP and mCherry. Mutagenic flaps encode a correction to the stop codon (FIG. 9A), enabling mCherry synthesis. Thus, mutagenesis efficiency can be quantified by GFP:mCherry ratios. Plasmid substrates were prepared in vitro and introduced into yeast (S. cerevisiae) or human cells (HEK293). High frequency mutagenesis was observed in both systems (FIG. 9B), and isolated yeast colonies contained either the reverted base, the mutated base, or a mixture of both products (FIG. 9C). Detection of the latter suggests that plasmid replication occurred prior to MMR in these cases, and further suggests that flap excision and ligation precede MMR. This result establishes the feasibility of DNA editing using 3′ mutagenic strands.

[1197] Systematic Studies with Model Flap Substrates

[1198] Based on the preliminary results described above, a broader spectrum of flap substrates will be evaluated in HEK cells to infer principles of efficient editing. 3′ ssDNA flaps will be systematically varied to determine the influence of mismatch pairings, the location of the mutagenic nucleotide along the flap, and the identity of the terminal nucleotide (FIG. 9D). Single nucleotide insertions and deletions will also be tested. Amplicon sequencing will be used to analyze editing precision. These results will help inform the design of gRNA reverse transcription templates.

[1199] In vitro TPRT on plasmid substrates leads to efficient editing outcomes. TPRT reactions developed in Aim 1 were used to induce mutagenesis within a plasmid substrate. The reaction was carried out on circular DNA plasmid substrates (see FIG. 10). This rules out the possibility of DNA strand dissociation as the mechanism for RT extension in the previous in vitro experiments. It also allowed for the testing of DNA repair of flap substrates in cells. A dual-fluorescent reporter plasmid was constructed for yeast (S. cerevisiae) expression. This plasmid encodes GFP (green fluorescent protein) and mCherry (red fluorescent protein) with an intervening stop codon (TGA). Expression of this construct in yeast produces only GFP. The plasmid was used as a substrate for in vitro TRT [Cas9(H840A) nickase, engineered gRNA, MLV RT enzyme, dNTPS]. The gRNA extension encodes a mutation to the stop codon. The flap strand is used for repair of the stop codon and it is anticipated to produce a plasmid that expresses both GFP and mCherry as a fusion protein. Yeast dual-FP plasmid transformants are shown in FIG. 10. Transforming the parent plasmid or an in vitro Cas9(H840A) nicked plasmid results in only green GFP expressing colonies. TRT reaction with 5′-extended or 3′-extended gRNAs produces a mix of green and yellow colonies. The latter express both GFP and mCherry. More yellow colonies are observed with the 3′-extended gRNA. A positive control that contains no stop codon is shown as well.

[1200] This result establishes that long double stranded substrates can undergo TPRT, and that TPRT products induce editing in eukaryotic cells.

[1201] Another experiment similar to the foregoing prime editing experiment was carried out, but instead of installing a point mutation in the stop codon, TRT editing installs a single nucleotide insertion (left) or deletion (right) that repairs a frameshift mutation and allows for synthesis of downstream mCherry (see FIG. 11). Both experiments used 3′ extended gRNAs. Individual colonies from the TRT transformations were selected and analyzed by Sanger sequencing (see FIG. 12). Green colonies contained plasmids with the original DNA sequence, while yellow colonies contained the precise mutation designed by the TRT editing gRNA. No other point mutations or indels were observed.

### Establish Prime Editing in HEK Cells Using RT-Cas9 Architectures

[1202] The optimized constructs from previous aims will be adapted for mammalian expression and editing at targeted sites in the human genome. Multiple RT enzymes and fusion architectures will be tested, in addition to adjacent targeting with secondary gRNAs (truncated to prevent nicking). Non-covalent RT recruitment will also be evaluated using the Sun-Tag system⁵² and MS2 aptamer system⁵³. Indel formation assays will be used to evaluate targeting efficiency with standard gRNAs and RT-Cas9 fusions (as above). Then, for each genomic site, extended gRNAs and RT-Cas9 pairs will be assayed for single nucleotide editing. Editing outcomes will be evaluated with MiSeq.

[1203] Initial experiments in HEK cells were performed using Cas9-RT fusions. Editing by components expressed within cells requires a Cas9(H840A) nickase, a reverse transcriptase (expressed as a fusion or supplied in trans), and an engineered gRNA with a 3′ extension (see FIG. 14). Preliminary studies indicated that the length of the primer binding site within the gRNA extension was important for increasing the efficiency of editing in human cells (see FIG. 15).

### Optimize Prime Editing Parameters in HEK Cells

[1204] After identifying Cas9-RT architectures that can perform prime editing in cells, the components and design will be optimized to achieve high efficiency editing. The location and nucleotide identity of the encoded point mutation, and the total length of the newly synthesized DNA strand, will be varied to evaluate editing scope and potential limitations. Short insertion and deletion mutations will also be evaluated. Protein expression constructs will be codon optimized. If successful, this would establish efficient prime editing in mammalian cells.

[1205] Preliminary Result. Additional gRNAs were designed to bring the RT enzyme to a higher local concentration at the editing locus, in the event that intramolecular reverse transcription by the fused RT enzyme were not possible. These auxiliary guides are truncated at the 5′ end (14-15 nt spacer), which has previously been shown to prevent Cas9 cutting but retain binding (see FIG. 16). The HEK3 locus was chosen to explore this strategy.

### Potential Difficulties and Alternatives

[1206] 1) gRNA degradation in cells: if extended gRNA termini are truncated in cells, stabilizing secondary structures could be installed, or synthetic gRNAs with stabilizing modifications could be tested. (2) No observed editing in human cells: additional strategies will be explored, including secondary targeting of RT-Cas9 fusions to adjacent genomic sites⁵⁴. In addition, potential directed evolution strategies in E. coli or S. cerevisiae could be explored.

[1207] Significance

[1208] If prime editing could be established in experimental cell lines, this would have an immediate impact for basic biomedical research by enabling the rapid generation and characterization of a large number of point mutations in human genes. The generality of the method, and its orthogonal editing window with respect to base editors, would provide an approach to installing many currently inaccessible mutations. Moreover, if prime editing could be optimized for high efficiency and product purity, its potential applicability to correcting disease mutations in other human cell types would be significant.

### 3. Achieve Site-Specific Editing of Pathogenic Mutations in Cultured Human Cells.

[1209] Background and Rationale.

[1210] A large number of pathogenic mutations cannot be corrected by current base editors due to PAM restrictions, or a need for transversion or indel mutation correction. With prime editing, all transitions and transversions are theoretically possible, as may be small insertions and deletions. Moreover, in relation to the PAM, the prime editing window (anticipated −3 to +4) is distinct from that of base editors (−18 to −12) (FIG. 13). Mendelian conditions not currently correctable by base editors include: (1) the sickle cell disease Glu6Val founder mutation in hemoglobin beta (requires A⋅T to T⋅A transversion); (2) the most common Wilson's disease variant His1069Gln in ATP7B (requires G⋅C to T⋅A transversion); and (3) the ΔPhe508 mutation in CFTR that causes cystic fibrosis (requires 3-nucleotide insertion). Each of these targets contains an appropriately positioned PAM for SpCas9 targeting and prime editing.

[1211] Preliminary Results.

[1212] T to a Editing in HEK3 Cells is not Achievable by Current Base Editing but is Achievable by TRPT Editing (See FIGS. 17A-17C).

[1213] FIG. 17A shows a graph displaying the % T to A conversion at the target nucleotide after transfection of components in human embryonic kidney (HEK) cells. This data presents results using an N-terminal fusion of wild type MLV reverse transcriptase to Cas9(H840A) nickase (32-amino acid linker). Editing efficiency was improved dramatically when the length of the primer binding site is extended from 7 nucleotides to 11 or 12 nucleotides. Additionally, the auxiliary guide A, which is positioned just upstream of the editing locus (see FIG. 16), significantly improves editing activity, particularly for shorter length primer binding sites. Editing efficiency was quantified by amplicon sequencing using the Illumina MiSeq platform. FIG. 17B also shows % T to A conversion at the target nucleotide after transfection of components in human embryonic kidney (HEK) cells, but this data presents results using a C-terminal fusion of the RT enzyme. Here, the auxiliary guide A does not have as much of an effect, and editing efficiency is overall higher. FIG. 17C shows data presenting results using an N-terminal fusion of wild type MLV reverse transcriptase to Cas9(H840A) nickase similar to that used in FIG. 17A; however the linker between the MLV RT and Cas9 is 60 amino acids long instead of 32 amino acids.

[1214] T to a Editing at HEK3 Site by TRPT Editing Results Displays High Purity.

[1215] FIG. 18 shows the output of sequencing analysis by high-throughput amplicon sequencing. The output displays the most abundant genotypes of edited cells. Of note, no major indel products are obtained, and the desired point mutation (T to A) is cleanly installed without bystander edits. The first sequence shows the reference genotype. The top two products are the starting genotype containing an endogenous polymorphism (G or A). The bottom two products represent the correctly edited genotypes.

[1216] MLV RT Mutants Improve Editing.

[1217] Mutant reverse transcriptases, described in Baranauskas, et al (doi:10.1093/protein/gzs034), were tested as C-terminal fusions to the Cas9(H840A) nickase for target nucleotide editing in human embryonic kidney (HEK) cells. Cas9-RT editor plasmid was co-transfected with a plasmid encoding a 3′-prime editing guide RNA that templates reverse transcription. Editing efficiency at the target nucleotide (blue bars) is shown alongside indel rates (orange bars) in FIG. 19. WT refers to the wild type MLV RT enzyme. The mutant enzymes (M1 through M4) contain the mutations listed to the right. Editing rates were quantified by high throughput sequencing of genomic DNA amplicons.

Complementary Strand Nicking with a Second gRNA Improves Editing.

[1218] This experiment evaluates editing efficiency of the target nucleotide when a single strand nick is introduced in the complementary DNA strand in proximity to the target nucleotide, with the hypothesis being that this would direct mismatch repair to preferentially remove the original nucleotide and convert the base pair to the desired edit. The Cas9(H840A)-RT editing construct was co-transfected with two guide RNA encoding plasmids, one of which templates the reverse transcription reaction, while the other targets the complementary DNA strand for nicking. Nicking at various distances from the target nucleotide was tested (orange triangles) (see FIG. 20). Editing efficiency at the target base pair (blue bars) is shown alongside the indel formation rate (orange bars). The “none” example does not contain a complementary strand nicking guide RNA. Editing rates were quantified by high throughput sequencing of genomic DNA amplicons.

[1219] FIG. 21 shows processed high throughput sequencing data showing the desired T to A transversion mutation and general absence of other major genome editing byproducts.

[1220] Scope. The potential scope for the new editing technology is shown in FIG. 13 and is compared to deaminase-mediated base editor technologies. Previously developed base editors target a region ˜15±2 bp upstream of the PAM. By converting target C or A nucleotides to T or G, respectively, previously developed base editors enable all transition mutations (A:T to G:C conversions). However, previously developed base editors are unable to install transversion mutations (A to T, A to C, G to T, G to C, T to A, T to G, C to A, C to G). Moreover, if there are multiple target nucleotides in the editing window, additional undesired edits can result.

[1221] The new prime editing technology could theoretically install any nucleotide and base pair conversion, and potentially small insertion and deletion edits as well. With respect to the PAM, prime editing windows start at the site of DNA nicking (3 bases upstream of the PAM) and end at an as-of-yet undetermined position downstream of the PAM. Of note, this editing window is distinct from that of deaminase base editors. Because the TPRT systems performs editing using DNA polymerase enzymes, it potentially has all of their benefits including generality, precision, and fidelity.

### Correct Pathogenic Mutations in Patient-Derived Cell Lines.

[1222] Cell lines harboring the relevant mutations (sickle cell disease: CD34+ hematopoietic stem cells; Wilson's disease: cultured fibroblasts; cystic fibrosis: cultured bronchial epithelia) will be obtained from ATCC, the Coriell Biobank, or collaborating Harvard/Broad affiliate laboratories. Editing efficiency will be evaluated by high throughput sequencing, and the efficacy of the corrected genotype will be tested using phenotypic assays (hemoglobin HPLC, ATP7B immunostaining, and CFTR membrane potential assays).

### Characterize Off-Target Editing Activity.

[1223] Potential off-target editing will be screened with established methods such as GUIDE-seq⁵⁵ and CIRCLE-seq⁵⁶ using target gRNAs paired with wild type Cas9. If potential off-targets are identified, these loci will be probed in TPRT edited cells to identify true off-target editing events.

### Potential Difficulties and Alternatives.

[1224] (1) Low editing efficiency: prime editor (PE)s may require optimization for each target. In this case, gRNA libraries can be tested to identify the highest functioning variants for specific applications. RT-Cas fusion expression and nuclear localization can be optimized. Liposomal RNP delivery could be used to limit off-target editing.

### Upcoming Experiments.

[1225] Optimization of gRNA designs can be achieved by further exploration of the primer binding site length and extension of synthesis template. Testing scope and generality will include different nucleotide conversions, small insertions and deletions, as well as, different editing positions with respect to PAM, and multiple sites in the human genome. Optimization of RT component will include exploring mutations in MLV RT to enhance activity (Rnase H inactivation, increase primer-template binding affinity, adjustments to processivity), and new RT enzymes (group II intro RTs, other retroviral RTs).

[1226] Significance.

[1227] Myriad genetic disorders result from single nucleotide changes in individual genes. Developing the genome editing technology described here, and applying it in disease-relevant cell types, would establish a foundation for translation to the clinic. For some diseases, such as Sickle Cell Disease, a single point mutation represents the dominant genotype throughout the population. However, for many other genetic disorders, a large heterogeneity of different point mutations within a single gene is observed throughout the patient population, each of which gives rise to a similar disease phenotype. Therefore, as a general genome editing method that could in theory target a large number of such mutations, this technology could provide enormous potential benefit to many of these patients and their families. If proof of principle for these applications could be established in cells, it would establish the foundation to studies in animal models of disease.

[1228] Advantages

[1229] Precision: the desired edit is encoded directed in nucleic acid sequence. Generality: in theory, could be possible to make any base pair conversion, including transversion edits, as well as small insertions or deletions. There is a distinct editing window from that of base editors with respect to Cas9 protospacer adjacent motif (PAM) sequence. This method achieves many of the editing capabilities of homology-directed repair (HDR), but without the major limitations of HDR (inefficient in most cell types, and is usually accompanied by an excess of undesired byproducts such as indels). Also, it does not make double-stranded DNA breaks (DSBs, so few indels, translocations, large deletions, p53 activation, etc.

### Example 2—Error-Prone Prime Editing (PE)

[1230] Prime editing (PE) systems described herein may also be used in conjunction with an error-prone reverse transcriptase enzyme to install mutations in a genome.

[1231] An embodiment is depicted in FIG. 22, which is a schematic of an exemplary process for conducting targeted mutagenesis with an error-prone reverse transcriptase on a target locus using a nucleic acid programmable DNA binding protein (napDNAbp) complexed with an extended guide RNA. This process may be referred to as an embodiment of prime editing for targeted mutagenesis. The extended guide RNA comprises an extension at the 3′ or 5′ end of the guide RNA, or at an intramolecular location in the guide RNA. In step (a), the napDNAbp/gRNA complex contacts the DNA molecule and the gRNA guides the napDNAbp to bind to the target locus to be mutagenized. In step (b), a nick in one of the strands of DNA of the target locus is introduced (e.g., by a nuclease or chemical agent), thereby creating an available 3′ end in one of the strands of the target locus. In certain embodiments, the nick is created in the strand of DNA that corresponds to the R-loop strand, i.e., the strand that is not hybridized to the guide RNA sequence. In step (c), the 3′ end DNA strand interacts with the extended portion of the guide RNA in order to prime reverse transcription. In certain embodiments, the 3′ ended DNA strand hybridizes to a specific RT priming sequence on the extended portion of the guide RNA. In step (d), an error-prone reverse transcriptase is introduced which synthesizes a mutagenized single strand of DNA from the 3′ end of the primed site towards the 3′ end of the guide RNA. Exemplary mutations are indicated with an asterisk “*”. This forms a single-strand DNA flap comprising the desired mutagenized region. In step (e), the napDNAbp and guide RNA are released. Steps (f) and (g) relate to the resolution of the single strand DNA flap (comprising the mutagenized region) such that the desired mutagenized region becomes incorporated into the target locus. This process can be driven towards the desired product formation by removing the corresponding 5′ endogenous DNA flap that forms once the 3′ single strand DNA flap invades and hybridizes to the complementary sequence on the other strand. The process can also be driven towards product formation with second strand nicking, as exemplified in FIG. 1F. Following endogenous DNA repair and/or replication processes, the mutagenized region becomes incorporated into both strands of DNA of the DNA locus.

### Example 3—Trinucleotide Repeat Contraction with PE

[1232] The prime editing system or prime editing (PE) system described herein may be used to contract trinucleotide repeat mutations (or “triplet expansion diseases”) to treating conditions such as Huntington's disease and other trinucleotide repeat disorders. Without wishing to be bound by theory, triplet expansion is caused by slippage during DNA replication or during DNA repair synthesis. Because the tandem repeats have identical sequence to one another, base pairing between two DNA strands can take place at multiple points along the sequence. This may lead to the formation of “loop out” structures during DNA replication or DNA repair synthesis. This may lead to repeated copying of the repeated sequence, expanding the number of repeats. Additional mechanisms involving hybrid RNA:DNA intermediates have been proposed. Prime editing may be used to reduce or eliminate these triplet expansion regions by deletion one or more or the offending repeat codon triplets. In an embodiment of this use, FIG. 23, provides a schematic of a PEgRNA design for contracting or reducing trinucleotide repeat sequences with prime editing.

[1233] Thus, prime editing may be able to be used to correct any trinucleotide repeat disorder, including, Huntington's disease, Fragile X syndrome, and Friedreich's ataxia.

[1234] The most common trinucleotide repeat contains CAG triplets, though GAA triplets (Friedreich's ataxia) and CGG triplets (Fragile X syndrome) also occur. The CAG triplets code for glutamine (Q), thus, CAG repeats result in polyglutamine tracts in the coding regions of diseased proteins. This particular class of trinucleotide repeat disorders are also called “polyglutamine (PolyQ) diseases.” Other trinucleotide repeats can cause alterations in gene regulation and are referred to as “non-polyglutamine diseases.” Inheriting a predisposition to expansion, or acquiring an already expanded parental allele, increases the likelihood of acquiring the disease. Pathogenic expansions of trinucleotide repeats could be corrected using prime editing.

[1235] Prime editing may be implemented to contract triplet expansion regions by nicking a region upstream of the triplet repeat region with the prime editor comprising a PEgRNA appropriated targeted to the cut site. The prime editor then synthesizes a new DNA strand (ssDNA flap) based on the PEgRNA as a template (i.e., the edit template thereof) that codes for a healthy number of triplet repeats (which depends on the particular gene and disease). The newly synthesized ssDNA strand comprising the healthy triplet repeat sequence also is synthesized to include a short stretch of homology (i.e., the homology arm) that matches the sequence adjacent to the other end of the repeat (red strand). Invasion of the newly synthesized strand, and subsequent replacement of the endogenous DNA with the newly synthesized ssDNA flap, leads to a contracted repeat allele.

### Example 4—Peptide Tagging with PE

[1236] The prime editing systems (i.e., PE systems) described herein may also be used to introduce various peptide tags into protein coding genes. Such tags can include HEXAhistidine tags, FLAG-tag, V5-tag, GCN4-tag, HA-tag, Myc-tag and others. This approach may be useful in applications such as protein fluorescent labeling, immunoprecipitation, immunoblotting, immunohistochemistry, protein recruitment, inducible protein degrons, and genome-wide screening. Embodiments are depicted in FIGS. 25 and 26.

[1237] FIG. 25 is a schematic showing gRNA design for peptide tagging genes at endogenous genomic loci and peptide tagging with TPRT genome editing (i.e., prime editing). The FlAsH and ReAsH tagging systems comprise two parts: (1) a fluorophore-biarsenical probe, and (2) a genetically encoded peptide containing a tetracysteine motif, exemplified by the sequence FLNCCPGCCMEP (SEQ ID NO: 1). When expressed within cells, proteins containing the tetracysteine motif can be fluorescently labeled with fluorophore-arsenic probes (see ref: J. Am. Chem. Soc., 2002, 124 (21), pp 6063-6076. DOI: 10.1021/ja017687n). The “sortagging” system employs bacterial sortase enzymes that covalently conjugate labeled peptide probes to proteins containing suitable peptide substrates (see ref: Nat. Chem. Biol. 2007 November; 3(11):707-8. DOI: 10.1038/nchembio.2007.31). The FLAG-tag (DYKDDDDK (SEQ ID NO: 2)), V5-tag (GKPIPNPLLGLDST (SEQ ID NO: 3)), GCN4-tag (EELLSKNYHLENEVARLKK (SEQ ID NO: 4)), HA-tag (YPYDVPDYA (SEQ ID NO: 5)), and Myc-tag (EQKLISEEDL (SEQ ID NO: 6)) are commonly employed as epitope tags for immunoassays. The pi-clamp encodes a peptide sequence (FCPF) (SEQ ID NO: 622) that can by labeled with a pentafluoro-aromatic substrates (ref: Nat. Chem. 2016 February; 8(2):120-8. doi: 10.1038/nchem.2413).

[1238] FIG. 26 shows precise installation of a His6-tag and a FLAG-tag into genomic DNA. A guide RNA targeting the HEK3 locus was designed with a reverse transcription template that encodes either an 18-nt His-tag insertion or a 24-nt FLAG-tag insertion. Editing efficiency in transfected HEK cells was assessed using amplicon sequencing. Note that the full 24-nt sequence of the FLAG-tag is outside of the viewing frame (sequencing confirmed full and precise insertion).

### Example 5—Prevention or Treatment of Prion Disease with PE

[1239] This invention could help address the problem of prion disease in humans, livestock, and wildlife. No previously described editing strategy is efficient and clean enough to install protective mutations or to reliably knock down PRNP. Cas9 nuclease and HDR can be used but will generate mostly a mixture of PRNP indel variants some of which are thought to be pathogenic. Moreover, HDR does not work in most types of cells. Prime editing is reliable and efficient at installing both types of mutations without generating an excess of double-stranded DNA breaks or resulting indels.

[1240] This invention describes how to install a protective mutation in PRNP that prevents or halts the progression of prion disease. This site is conserved in mammals, so in addition to treating human disease it could also be used to generate cows and sheep that are immune to prion disease, or even help cure wild populations of animals that are suffering from prion disease. Prime editing has already been used to achieve ˜25% installation of a naturally occurring protective allele in human cells, and previous mouse experiments indicate that this level of installation is sufficient to cause immunity from most prion diseases. This method is the first and potentially only current way to install this allele with such high efficiency in most cell types. Another possible strategy for treatment is to use prime editing to reduce or eliminate the expression of PRNP by installing an early stop codon in the gene. Many researchers predict that doing so would treat the disease.

[1241] Three potential therapeutic strategies include prime editing to reduce expression of PrP. This goal may be accomplished by the introduction of mutations that cause a premature stop codon in PRNP, eliminate the start codon, mutate or delete essential amino acids codons, introduce or remove splice sites to generate an aberrant transcript, or alter regulatory elements that reduce transcript levels. Prime editing to eliminate disease mutations. Many variants of PRNP have been described (ncbi.nlm.nih.gov/pmc/articles/PMC6097508/#b154-ndt-14-2067) that lead to an increased likelihood of contracting disease. Each known variant could be reversed using prime editing, since prime editing can make all possible types of point mutations, local insertions, and local deletions. Prime editing to introduce one or more protective mutations into PRNP that disrupt prion formation and/or transmission. For example, G127V in the human PRNP gene has been demonstrated to protect against many forms of prion disease (ncbi.nlm.nih.gov/pmc/articles/PMC4486072/). This mutation was later described to interfere with prion formation by preventing formation of stable beta sheets and dimers (ncbi.nlm.nih.gov/pubmed/30181558, ncbi.nlm.nih.gov/pubmed/26906032). In addition to the introduction of single nucleotide polymorphisms, the insertion or deletion of sequences in PRNP that would interfere with prion formation could also be used to protect from or treat prion disease.

[1242] The third therapeutic strategy is particularly advantageous because the introduction of protective variants could confer a benefit even when a relatively small number of cells experience the edit. Furthermore, the introduction of protective variants, especially those naturally occurring in human populations such as G127V, would not be expected to have any detrimental consequences, while reducing expression of prion protein as in strategy 1 could have some detrimental phenotypes, as have been documented in PRNP knock-out mice (ncbi.nlm.nih.gov/pmc/articles/PMC4601510/, ncbi.nlm.nih.gov/pmc/articles/PMC2634447/).

[1243] It has previously been demonstrated that mice expressing a ratio of approximately 2:1 of the wild type human prion protein: the protective G127V variant of the human prion protein (approximately 33% expression of the protective variant) were entirely immune to most tested forms of prion disease and were also resistant to variant Creutzfeldt-Jakob disease (vCJD), the human disease transmitted from bovine spongiform encephalopathy (BSE, or mad cow disease)⁹¹. Mice that only expressed the protective G127V variant were entirely immune to all tested prion disease challenges, including vCJD.

[1244] It is demonstrated herein that the protective G127V mutation can be efficiently installed in human cells in tissue culture using prime editing (see FIG. 27).

[1245] Informed by these results, three settings are described in which PRNP editing could be used. One setting PRNP editing can be used is prime editing in human patients to prevent or treat prion disease. A second setting PRNP editing can be used is prime editing in livestock to prevent the occurrence and spread of prion disease. Both cow and sheep livestock have experienced sporadic occurrence of prion disease caused by the protein generated by the PRNP gene. In addition to the debilitating and deadly disease suffered by the animal, these cases are also economically devastating, in part due to the care that must be taken to prevent the spread of the extremely infectious disease. A single dairy cow in the state of Washington tested positive for BSE in December of 2003, which led to a projected loss of 2.8-4.2 billion dollars in beef sales the following year bookstore.ksre.ksu.edu/pubs/MF2678.pdf). The PRNP gene is highly conserved in mammals. Introducing a PRNP mutation such as G127V into the livestock germline could eliminate the occurrence of BSE or scrapie, the manifestation of prion disease in sheep. A third setting PRNP editing can be used is prime editing in wildlife could prevent the spread of wild prion disease. Currently, cervid populations including deer, elk, and moose in North America are suffering from chronic wasting disease (CWD), a manifestation of prion disease caused by PNRP in these species. The occurrence has been reported to be as high as 25% in some populations (cdc.gov/prions/cwd/occurrence.html). CWD has also been reported in Norway, Finland, and South Korea. It is not yet known whether the disease is transmissible from these species to humans (cdc.gov/prions/cwd/transmission.html) or livestock. The introduction of PRNP mutations such as G127V in the germline of these species could protect them from CWD and reduce the risk of transmission to other species including humans.

[1246] This method could be used to treat Creutzfeldt-Jakob Disease (CJD), kuru, Gerstmann-Sträussler-Scheinker disease, fatal familial insomnia (FFI), bovine spongiform encephalopathy (BSE; mad cow disease), scrapie (in sheep), and chronic wasting disease (CWD; in deer, elk, and moose).

[1247] The method would need to be combined with a delivery methodology for embryos or adult neurons, such as microinjection, lipid nanoparticles, or AAV vectors.

### Example 6—RNA Tagging and Manipulation Using PE

[1248] A new method for the insertion of motifs into genetic sequences that tag or otherwise manipulate RNA within mammalian, eukaryotic, and bacterial cells is described herein. While it is estimated that only 1% of the human genome encodes proteins, virtually all of the genome is transcribed at some level. It is an open question how much of the resulting non-coding RNA (ncRNA) plays a functional role, let alone what the roles of most of these putative RNAs are. “Tagging” of these RNA molecules via the insertion of a novel RNA-encoding sequence with a useful property into genes of interest is a useful method for studying the biological functions of RNA molecules in cells. It can also be useful install tags onto protein-encoding mRNAs as a means to perturb and thus better understand how mRNA modifications can affect cellular function. For instance, a ubiquitous natural RNA tag-polyadenylation—is used by cells to affect transport of mRNA into the cytoplasm. Different types of polyadenylation signals result in different transport rates and different mRNA lifespans and—thus—differences in the levels to which the encoded protein is expressed.

[1249] A common approach for expressing tagged RNAs within cells is to exogenously introduce a synthetic construct using either (i) transient plasmid transfection that produces a short-term burst of gene expression, often at supraphysiologic levels; or (ii) permanent integration of the tagged RNA gene into the genome (at random sites) using lentiviral integration or transposons, which enables prolonged expression. Both of these approaches are limited by production of altered expression levels, and by the absence of natural mechanisms that regulate the expression or activity of the gene. An alternative strategy is to directly tag a gene of interest at its endogenous locus using homology-directed repair (HDR) of double-stranded DNA breaks induced by Cas9 or other targeted DNA nucleases. While this approach enables the generation of a wide range of endogenously tagged genes, HDR is markedly inefficient and so requires significant screening to identify the desired clonal population of cells that have been successfully tagged. Moreover, HDR is typically very inefficient or entirely inactive in a large number of cell types, most notably in post-mitotic cells. The low efficiency of HDR is further complicated by the generation of undesired indel products, would could be especially problematic in the case of RNA genes as they might lead to the production of an RNA whose activities interfere with the function of normal alleles. Finally, researchers often need to screen various tagging positions within an RNA molecule to achieve optimal performance. Combined, these drawbacks make HDR a less desirable method for installation of tags in RNA.

[1250] Prime editing is a new genome editing technology that enables targeted editing of genomic loci via the transfer of genetic information from RNA to DNA. Using prime editing, RNA genes could be tagged with a variety of components such as RNA aptamers, ribozymes, or other RNA motifs. Prime editing has the potential to be faster, cheaper, and effective in a greater variety of cell types by comparison to HDR strategies. As such, the described invention represents a novel, useful, and non-obvious tool for investigating the biology of RNA genes in health and disease. A new method for the insertion of RNA motifs into genetic sequences that tag or otherwise manipulate RNA using prime editors (PEs) is described herein. PEs are capable of site-specifically inserting, mutating, and/or deleting multiple nucleotides at a desired genomic locus that is targetable by a CRISPR/Cas system. PEs are composed of fusions between Cas9 nuclease domains and reverse transcriptase domains. They are guided to their genomic target by engineered PEgRNAs (prime editing guide RNAs), which contain a guide spacer portion for DNA targeting, as well as a template for reverse transcription that encodes the desired genome edit (see FIG. 28A). It is envisioned that PE can be used to insert motifs that are functional at the RNA level (hereafter RNA motifs) to tag or otherwise manipulate non-coding RNAs or mRNAs. These motifs could serve to increase gene expression, decrease gene expression, alter splicing, change post-transcriptional modification, affect the sub-cellular location of the RNA, enable isolation or determination of the intra- or extra-cellular location of the RNA (using, for instance, fluorescent RNA aptamers such as Spinach, Spinach2, Baby Spinach, or Broccoli), recruit endogenous or exogenous protein or RNA binders, introduce sgRNAs, or induce processing of the RNA, by either self-cleavage or RNAses (see FIG. 28B). Due to the flexibility of prime editing, it is not possible to provide a comprehensive list of RNA motifs that could be installed within the genome. A series of examples are shown here that broadly illustrate the predicted scope of PE-installed RNA motifs that could be used to tag RNA genes. It is currently not possible to efficiently and fairly cleanly make these changes in most types of cells (including the many that do not support HDR) using any other reported genome editing method besides PE.

[1251] Gene expression could be affected by encoding a 3′ untranslated region (UTR) that results in changes in nuclear transport or retention or mRNA lifespan. For instance, the polyA tail from polyomavirus simian virus 40 (SV40) has additional helper sequences that enable efficient transcription termination and can increase gene expression relative to other 3′ UTRs^{57,58}. Example sequence of SV40 polyA tail:

SV40 POLYA TAIL
(SEQ ID NO: 331)
AACTTGTTTATTGCAGCTTATAATGGTTACAAATAAAGCAATAGCATCAC
AAATTTCACAAATAAAGCATTTTTTTCACTGCATTCTAGTTGTGGTTTGT
CCAAACTCATCAATGTATCTTA

[1252] Post-translational modification signals, besides polyadenylation signals, could also be encoded by PE. These include signals incorporate N6-methyladenosine, N1-methyladenosine, 5-methylcytosine, and pseudouridine modifications⁵⁹. By using PE to include sequences bound by enzymes that write or remove these modifications within an RNA transcript, it would be possible to induce their writing or erasing. This could be used as a tool to study the effects of these markers, to induce cellular differentiation, affect stress responses, or, given the function of these markers are as yet underexplored, affect targeted cells in other fashions.

[1253] PE could encode mutations that affect subcellular localization. For instance, incorporation of tRNA-Lys within an mRNA can theoretically result in transport to the mitochondria⁶⁰, while various 3′ UTRs can result in nuclear retention or transport⁶¹.

### Examples

[1254] SV40 polyA signal results in transport.

SV40 POLYA TAIL
(SEQ ID NO: 331)
AACTTGTTTATTGCAGCTTATAATGGTTACAAATAAAGCAATAGCATCAC
AAATTTCACAAATAAAGCATTTTTTTCACTGCATTCTAGTTGTGGTTTGT
CCAAACTCATCAATGTATCTTA

[1255] U1 snRNA 3′ box results in retention.

U1 SNRNA 3′ BOX
(SEQ ID NO: 625)
TTCATTCAGCAAGTTCAGAGAAATCTGAACTTGCTGGATTTTTGGAGCAG
GGAGATGGAATAGGAGCTTGCTCCGTCCACTCCACGCATCGACCTGGTAT
TGCAGTACCTCCAGGAACGGTGCACCCACTTTCTGGAGTTTCAAAAGTAG
ACTGTACGCTAAGGGTCATATCTTTTTTTGTTT GGTTTGTGTCTTGGTT
GGCGTCTTAA

[1256] Determining the sub-cellular localization of endogenous RNA can be challenging and requires the addition of exogenous, fluorescently-tagged nucleotide probes, as in the case of FISH, or time-consuming and potentially inaccurate cell fractionation followed by RNA detection. Encoding a probe within the endogenous RNA would obviate many of these issues. One example would be to encode a fluorescent RNA aptamer, such as Spinach⁶² or Broccoli within an endogenous RNA, thereby visualizing the presence of that RNA via addition of a small molecule proto-fluorophore.

[1257] Broccoli Aptamer:

BROCCOLI APTAMER
(SEQ ID NO: 357)
GAGACGGTCGGGTCCAGATATTCGTATCTGTCGAGTAGAGTGTGGGCTC

[1258] PE could insert or remove sequences that encode RNA that are recognized by RNA binding proteins, affecting RNA stability, expression, localization, or modification (for instance, see proteins listed⁶³)

[1259] PE could insert sequences that encode sgRNAs within the genome, as a viral or cancer defense mechanism. Similarly, it could be used to insert microRNAs (e.g., pre-microRNAs) to direct silencing of targeted genes.

[1260] PE could insert sequences resulting in processing of the RNA, either by itself, or by external factors, either as a therapy or tool for studying the function of various portions of the RNA. For instance, the HDV ribozyme⁶⁴, when included within an RNA sequence, results in processing of the RNA immediately 5′ of the ribozyme, while the hammerhead ribozyme cleaves prior to the third stem within the ribozyme⁶⁵. Other self-cleaving ribozymes include pistol⁶⁶, hatchet⁶⁶, hairpin⁶⁷, Neuropora Varkud satellite⁶⁸, glmS⁶⁹, twister⁷⁰, and twister sister⁶⁶. These sequences could include wild-type or engineered or evolved versions of ribozymes. The majority of these ribozymes could have different sequences depending on the region of RNA into which they were associated, depending on where the ribozyme cut site is located. Sequences that would direct the processing of the RNA by external factors, such as sequence specific RNAses⁷¹, RNAses that recognize specific structures⁷²—such as Dicer⁷³ and Drosha⁷⁴, could also be achieved.

[1261] HDV Ribozyme:

HDV RIBOZYME
(SEQ ID NO: 365)
GGCCGGCATGGTCCCAGCCTCCTCGCTGGCGCCGGCTGGGCAACATGCTT
CGGCATGGCGAATGGGAC

### References for Example 6

[1262] The following references are incorporated herein by reference in their entireties.
[1263] 1. Schek N, Cooke C, Alwine J C. Molecular and Cellular Biology. 1992.
[1264] 2. Gil A, Proudfoot N J. Cell. 1987.
[1265] 3. Zhao, B. S., Roundtree, I. A., He, C. Nat Rev Mol Cell Biol. 2017.
[1266] 4. Rubio, M. A. T., Hopper, A. K. Wiley Interdiscip Rev RNA 2011.
[1267] 5. Shechner, D. M., Hacisuleyman E., Younger, S. T., Rinn, J. L. Nat Methods. 2015.
[1268] 6. Paige, J. S., Wu, K. Y., Jaffrey, S. R. Science 2011.
[1269] 7. Ray D., . . . Hughes T R. Nature 2013.
[1270] 8. Chadalavada, D. M., Cerrone-Szakal, A. L., Bevilacqua, P. C. RNA 2007.
[1271] 9. Forster A C, Symons R H. Cell. 1987.
[1272] 10. Weinberg Z, Kim P B, Chen T H, Li S, Harris K A, Lunse C E, Breaker R R. Nat. Chem. Biol. 2015.
[1273] 11. Feldstein P A, Buzayan J M, Bruening G. Gene 1989.
[1274] 12. Saville B J, Collins R A. Cell. 1990.
[1275] 13. Winkler W C, Nahvi A, Roth A, Collins J A, Breaker R R. Nature 2004.
[1276] 14. Roth A, Weinberg Z, Chen A G, Kim P G, Ames T D, Breaker R R. Nat Chem Biol. 2013.
[1277] 15. Choudhury R, Tsai Y S, Dominguez D, Wang Y, Wang Z. Nat Commun. 2012.
[1278] 16. MacRae I J, Doudna J A. Curr Opin Struct Biol. 2007.
[1279] 17. Bernstein E, Caudy A A, Hammond S M, Hannon G J Nature 2001.
[1280] 18. Filippov V, Solovyev V, Filippova M, Gill S S. Gene 2000.

### Example 7—Generation of Gene Libraries with PE

[1281] A new method for the cellular generation of highly sophisticated libraries of protein- or RNA-coding genes with defined or variable insertions, deletions, or defined amino acid/nucleotide conversions, and their use in high-throughput screening and directed evolution is described herein. The references cited in the Example are based from the list of references included at the end of this Example.

[1282] The generation of variable genetic libraries has most commonly been accomplished through mutagenic PCR¹. This method relies on either using reaction conditions that reduce the fidelity of DNA polymerase, or using modified DNA polymerases with higher mutation rates. As such, biases in these polymerases are reflected in the library product (e.g. a preference for transition mutations versus transversions). An inherent limitation of this approach to library construction is a relative inability to affect the size of the gene being varied. Most DNA polymerases have extremely low rates of indel mutations² (insertions or deletions), and most of these will result in frameshift mutations in protein-coding regions, rendering members of the library unlikely to pass any downstream selection. Additionally, biases in PCR and cloning can make it difficult to generate single libraries consisting of genes of different sizes. These limitations can severely limit the efficacy of directed evolution to enhance existing or engineer novel protein functions. In natural evolution, large changes in protein function or efficacy are typically associated with insertion and deletion mutations that are unlikely to occur during canonical library generation for mutagenesis. Furthermore, these mutations most commonly occur in regions of the protein in question that are predicted to form loops, as opposed to the hydrophobic core. Thus, most indels generated using a traditional unbiased approach are likely to either be deleterious or ineffective.

[1283] Libraries that could bias such mutations to the sites within the protein where they would be most likely to be beneficial, i.e. loop regions, would have a significant advantage over traditional libraries given that all libraries access only a fraction of the possible mutation space. Finally, although it is possible to generate genetic libraries with site-specific indel mutations through multistep PCR and clonal assembly using NNK primers or via DNA shuffling, these libraries cannot undergo additional rounds of ‘indelgenesis’ in continual evolution. Continuous evolution is a type of directed evolution with minimal user intervention. One such example is PACE³. Because continuous evolution occurs with minimal user intervention, any increase in library diversity during the evolution must occur using the native replication machinery. As such, although libraries of genes with inserted or removed codons as specific loci can be generated and screened in PACE, additional rounds of ‘indelgenesis’ are not possible.

[1284] It is envisioned that the programmability of prime editing (PE) can be leveraged to generate highly sophisticated, programmed genetic libraries for use in high-throughput screening and directed evolution (see FIG. 29A). PE can insert, change or remove defined numbers of nucleotides from specified genetic loci using information encoded in a prime editing guide RNA (PEgRNA) (see FIG. 29B). This enables the generation of targeted libraries with one or more amino acids inserted or removed from the loop regions wherein mutations are most likely to give rise to changes in function, without background introduction of nonfunctional frameshift mutations (see FIG. 29C). PE can be used to install specific sets of mutations without regard for biases inherent in either DNA polymerase or the sequence being mutated.

[1285] For instance, while converting a CCC codon to a stop codon would be an unlikely occurrence via canonical library generation because it would require three consecutive mutations, including two transversions, PE could be used to convert any given, targeted codon to a TGA stop codon in one step. They could also be used to install programmed diversity at given positions, for instance by incorporating codons encoding any hydrophobic amino acid at a given site, while not encoding any others. Furthermore, because of the programmability of PE, multiple PEgRNAs could be utilized to generate multiple different edits at multiple sites simultaneously, enabling the generation of highly programmed libraries (see FIG. 29D). Additionally, it is possible to use reverse transcriptases with lower fidelity to generate regions of mutagenesis within an otherwise invariable library (such as the HIV-I reverse transcriptase⁴ or Bordetella phage reverse transcriptase⁵).

[1286] The possibility of iterative rounds of PE on the same site is also envisioned, allowing—for instance—the repeated insertion of codons at a single site. Finally, it is envisioned that all of the above described approaches can be incorporated into continual evolution, enabling the generation of novel in situ evolving libraries (see FIG. 30). They could also be used to construct these libraries within other cell types where it would otherwise be difficult to assemble large libraries, for instance within mammalian cells. Generation of PE-encoding bacterial strains that have been optimized for directed evolution would be a useful additional tool for the identification of proteins and RNAs with improved or novel functionality. All of these uses of PE are non-obvious due to the novel nature of PEs. In conclusion, library generation via PE would be a highly useful tool in synthetic biology and directed evolution, as well as for high-throughput screening of protein and RNA combinatorial mutants.

### Competing Approaches

[1287] The chief method by which diverse libraries are currently generated is by mutagenic PCR¹, described above. Insertions or deletions can be introduced via degenerated NNK primers at defined sites during PCR, although introducing such mutations at multiple sites requires multiple rounds of iterative PCR and cloning before constructing a more diverse library via mutagenic PCR, rendering the method slow. An alternative, complementary method is DNA shuffling, where fragments of a library of genes generated via DNase treatment are introduced into a PCR reaction without primers, resulting in the annealing of different fragments to each other and the rapid generation of more diverse libraries than via mutagenic PCR alone⁶. Although this approach can theoretically generate indel mutations, it more often results in frameshift mutations that destroy gene function. Furthermore, DNA shuffling requires a high degree of homology between gene fragments. Both of these methods must be done in vitro, with the resulting library transformed into cells, while libraries generated by PE can be constructed in situ, enabling their use in continual evolution. While libraries can be constructed in situ through in vivo mutagenesis, these libraries rely on the host cellular machinery and exhibit biases against indels. Similarly, although traditional cloning methods can be used to generate site-specific mutational profiles, they cannot be used in situ and are generally assembled one at a time in vitro before being transformed into cells. The efficiency and broad functionality of PE in both prokaryotic and eukaryotic cell types further suggests that these libraries could be constructed directly in the cell type of interest, as opposed to being cloned into a model organism such as E. coli and then transferred into the cell or organism of interest. Another competing approach for targeted diversification is automated multiplex genome engineering, or MAGE, wherein multiple single-stranded DNA oligonucleotides can be incorporated within replication forks and result in programmable mutations⁷. However, MAGE requires significant modification of the host strain and can lead to a 100-fold increase in off-target or background mutations⁸, whereas PE is more highly programmed and anticipated to result in fewer off-target effects. Additionally, MAGE has not been demonstrated in a wide variety of cell types, including mammalian cells. Prime editing is a novel and non-obvious complementary technique for library generation.

### Examples of PE in Directed Evolution to Construct Gene Libraries

[1288] In one example, PE can be used in a directed evolution experiment to introduce protein variants into gene libraries during a continual evolution experiment using PACE, permitting iterative accumulation of both point mutations and indels in a manner not possible via traditional approaches. It has already been shown that PE can site-specifically and programmably insert nucleotides into a genetic sequence in E. coli. In the outlined directed evolution, it is proposed to identify monobodies with improved binding to a specific epitope via a modified two-hybrid protein:protein binding PACE selection. Specific and highly variable loops within these monobodies contribute significantly to affinity and specificity. Improved monobody binding might be obtained rapidly in PACE by varying the length and composition of these loops in a targeted fashion. However, varying sequence length is not an established functionality of PACE. While library of varied loop sizes might be used as a starting point for PACE, no subsequent improvements to length would arise throughout the PACE selection, barring access to beneficial synergistic combinations of point mutations and indel mutations. Introducing PE to the PACE selection would enable the in situ generation and evolution of monobodies with varying loop lengths. To do so, it is envisioned the introduction of an additional PE plasmid to the host E. coli strain, encoding the PE enzyme and one or more PEgRNAs. Expression of PE enzyme and PEgRNAs would be under the control of a small molecule delivered to the PACE lagoon at a rate selected by the experimenter.

[1289] In various embodiments, the PEgRNA components would contain a spacer directing the PE to the site of interest on the selection phage and would be designed such that a multiple of three nucleotides could be inserted at the target site such that a new PEgRNA binding site would be introduced, enabling the iterative insertion of one or more codons at the targeted site.

[1290] In parallel, another host E. coli strain might include PEgRNAs that would template the removal of one or more codons, enabling loop size to shrink during the evolution. A PACE experiment might utilize a mixture of both strains or alternate the two to permit the slow and controlled addition or removal of loop sequences.

[1291] It is noted that this technique can also be applied to the evolution of antibodies. The binding principles governing antibodies are very similar to those governing monobodies: the length of antibody complement-determining region loops is critical to their binding function. Further, longer loop lengths have been found to be critical in the development of rare antibodies with broadly protective activity against HIV-1 and other viral infections⁹. Application of PE as described above to an antibody or antibody-derived molecule would permit the generation of antibodies with diverse loop length and varied loop sequence. In combination with PACE, such an approach would permit enhanced binding through loop geometries not accessible to standard PACE, and thus permit evolution of highly functional antibodies.

[1292] Experiments will show the ability to use PE to correct a deleterious mutation in bacteriophage M3 in phage-assisted non-continuous evolution (PANCE), a necessary first step for using PE in continuous evolution (see FIG. 69).

### References for Example 7

[1293] The following references are incorporated herein by reference in their entireties.
[1294] 1. Cadwell R C and Joyce G F. PCR Methods Appl. 1992.
[1295] 2. McInerney P, Adams P, and Hadi M Z. Mol Biol Int. 2014.
[1296] 3. Esvelt K M, Carlson J C, and Liu D R. Nature. 2011.
[1297] 4. Naorem S S, Hin J, Wang S, Lee W R, Heng X, Miller J F, Guo H. Proc Natl Acad Sci USA 2017.
[1298] 5. Martinez M A, Vartanian J P, Wain-Hobson S. Proc Natl Acad Sci USA 1994.
[1299] 6. Meyer A J, Ellefson J W, Ellington A D. Curr Protoc Mol Biol. 2014.
[1300] 7. Wang H H, Isaacs F J, Carr P A, Sun Z Z, Xu G, Forest C R, Church G M. Nature. 2009.
[1301] 8. Nyerges A et al. Proc Natl Acad Sci USA. 2016.
[1302] 9. Mascola J R, Haynes B F. Immunol Rev. 2013.

### Example 8—Immunoepitope Insertion by PE

[1303] Precise genome targeting technologies using the CRISPR/Cas system have recently been explored in a wide range of applications, including the insertion of engineered DNA sequences into targeted genomic loci. Previously, homology-directed repair (HDR) has been used for this application, requiring an ssDNA donor template and repair initiation by means of a double-stranded DNA break (DSB). This strategy offers the broadest range of possible changes to be made in cells and is the only method available to insert large DNA sequences into mammalian cells. However, HDR is hampered by undesired cellular side effects stemming from its initiating DSB, such as high levels of indel formation, DNA translocations, large deletions, and P53 activation. In addition to these drawbacks, HDR is limited by low efficiency in many cell types (T cells are a notable exception to this observation). Recent efforts to overcome these drawbacks include fusing human Rad51 mutants to a Cas9 D10A nickase (RDN), resulting in a DSB-free HDR system that features improved HDR product:indel ratios and lower off target editing, but is still hampered by cell-type dependencies and only modest HDR editing efficiency.

[1304] Recently developed fusions of Cas9 to reverse transcriptases (“Prime editors”) coupled with PEgRNAs represent a novel genome editing technology that offers a number of advantages over existing genome editing methods, including the ability to install any single nucleotide substitution, and to insert or delete any short stretch of nucleotides (up to at least several dozen bases) in a site-specific manner. Notably, PE edits are achieved with generally low rates of unintended indels. As such, PE enables targeted insertion-based editing applications that have been previously impossible or impractical.

[1305] This particular invention describes a method for using prime editing as a means to insert known immunogenicity epitopes into endogenous or foreign genomic DNA, resulting in modification of the corresponding proteins for therapeutic or biotechnological applications (see FIGS. 31 and 32). Prior to the invention of prime editing, such insertions could be achieved only inefficiently and with high rates of indel formation from DSBs. prime editing solves the problem of high indel formation from insertion edits while generally offering higher efficiency than HDR. This lower rate of indel formation presents a major advantage of prime editing over HDR as a method for targeted DNA insertions, especially in the described application of inserting immunogenicity epitopes. The length of epitopes is in a range from few bases to hundreds of bases. Prime editor is the most efficient and cleanest technology to achieve such targeted insertions in mammalian cells.

[1306] The key concept of the invention is the use of prime editors to insert a nucleotide sequence containing previously described immunogenicity epitopes into endogenous or foreign genomic DNA for the downregulation and/or destruction of their protein products and/or expressing cell types. Nucleotide sequences for immunogenic epitope insertion would be targeted to genes in a manner to produce fusion proteins of the targeted gene's coded protein and the inserted immunogenic epitope's corresponding protein translation. Patient's immune systems will have been previously trained to recognize these epitopes as a result of standard prior immunization from routine vaccination against, for example, tetanus or diphtheria or measles. As a result of the immunogenic nature of the fused epitopes, patient's immune systems would be expected to recognize and disable the prime edited protein (not just the inserted epitope) and potentially the cells from which it was expressed.

[1307] Fusions to targeted genes would be engineered as needed to ensure the inserted epitope protein translation is exposed for immune system recognition. This could include targeted nucleotide insertions resulting in protein translations yielding C-terminal fusions of immunogenicity epitopes to targeted genes, N-terminal fusions of immunogenicity epitopes to targeted genes, or the insertion of nucleotides into genes so that immunogenicity epitopes are coded within surfaced-exposed regions of protein structure.

[1308] Protein linkers encoded as nucleotides inserted between the target gene sequence and the inserted immunogenicity epitope nucleotide sequence may need to be engineered as part of this invention to facilitate immune system recognition, cellular trafficking, protein function, or protein folding of the targeted gene. These inserted nucleotide-encoded protein linkers may include (but are not limited to) variable lengths and sequences of the XTEN linker or variable lengths and sequences of Glycine-Serine linkers. These engineered linkers have been previous used to successfully facilitate protein fusions.

[1309] Distinguishing features of this invention include the ability to use previously acquired immune responses to specific amino acid sequences as a means to induce an immune response against otherwise non-immunogenic proteins. Another distinguishing feature is the ability to insert the nucleotide sequences of these immunogenic epitopes in a targets manner that does not induce high levels of unwanted indels as a by-product editing and is efficient in its insertion. The invention discussed herein also has the ability to combine cell type-specific delivery methods (such as AAV serotypes) to insert epitopes in cell types that are of interest to trigger an immune response to.

[1310] Prime editing as a means of inserting immunogenic epitopes into pathogenic genes could be used to program the patient's immune system to fight a wide variety of diseases (not limited to cancer as with immuno-oncology strategies). An immediately relevant use of this technology would be as a cancer therapeutic as it could undermine a tumor's immune escape mechanism by causing an immune response to a relevant oncogene like HER2 or growth factors like EGFR. Such an approach could seem similar to T-cell engineering, but one novel advance of this approach is that it can be utilized in many cell types and for diseases beyond cancer, without needed to generate and introduce engineered T-cells into patients.

[1311] Using PE to insert an immunogenicity epitope which most people are already vaccinated against (tetanus, pertussis, diphtheria, measles, mumps, rubella, etc.) into a foreign or endogenous gene that drives a disease, so the patient's immune system learns to disable that protein.

[1312] Diseases that stand to have a potential therapeutic benefit from the aforementioned strategy include those caused by aggregation of toxic proteins, such as in fatal familial insomnia. Other diseases that could benefit include those caused by pathogenic overexpression of an otherwise nontoxic endogenous protein, and those caused by foreign pathogens.

[1313] Primary therapeutic indications include those mentioned above such as therapeutics for cancer, prion and other neurodegenerative diseases, infectious diseases, and preventative medicine. Secondary therapeutic indications may include preventative care for patients with late-onset genetic diseases. It is expected that current standard of care medicines may be used in conjunction with prime editing for some diseases, like particularly aggressive cancers, or in cases where medications help alleviate disease symptoms until the disease completely cured. Below are examples of immunogenic epitopes that can by inserted by prime editing can be used to achieve:

| | | Epitope Amino Acid | |
|---|---|---|---|
| Vaccine | Disease | Sequence | Example Nucleic Acid Sequence (8) |
| 1 | Tetanus | QYIKANSKFIGITE | CATGATATAAAAGCAAATTCTAAAT |
| | toxoid | L (SEQ ID NO: 396) | TTATAGGTATAACTGAACTA (SEQ ID |
| | | | NO: 397) |
| 2 | Diphtheria | GADDVVDSSKSF | GGCGCCGACGACGTGGTGGACAGCA |
| | toxin mutant | VMENFSSYHGTK | GCAAGAGCTTCGTGATGGAGAACTT |
| | CRM197 | PGYVDSIQKGIQK | CAGCAGCTACCACGGCACCAAGCCC |
| | | PKSGTQGNYDDD | GGCTACGTGGACAGCATCCAGAAGG |
| | | WKEFYSTDNKYD | GCATCCAGAAGCCCAAGAGCGGCAC |
| | | AAGYSVDNENPL | CCAGGGCAACTACGACGACGACTGG |
| | | SGKAGGVVKVTY | AAGGAGTTCTACAGCACCGACAACA |
| | | PGLTKVLALKVD | AGTACGACGCCGCCGGCTACAGCGT |
| | | NAETIKKELGLSL | GGACAACGAGAACCCCCTGAGCGGC |
| | | TEPLMEQVGTEEF | AAGGCCGGCGGCGTGGTGAAGGTGA |
| | | IKRFGDGASRVVL | CCTACCCCGGCCTGACCAAGGTGCT |
| | | SLPFAEGSSSVEYI | GGCCCTGAAGGTGGACAACGCCGAG |
| | | NNWEQAKALSVE | ACCATCAAGAAGGAGCTGGGCCTGA |
| | | LEINFETRGKRGQ | GCCTGACCGAGCCCCTGATGGAGCA |
| | | DAMYEYMAQAC | GGTGGGCACCGAGGAGTTCATCAAG |
| | | AGNRVRRSVGSS | AGGTTCGGCGACGGCGCCAGCAGGG |
| | | LSCINLDWDVIRD | TGGTGCTGAGCCTGCCCTTCGCCGA |
| | | KTKTKIESLKEHG | GGGCAGCAGCAGCGTGGAGTACATC |
| | | PIKNKMSESPNKT | AACAACTGGGAGCAGGCCAAGGCCC |
| | | VSEEKAKQYLEEF | TGAGCGTGGAGCTGGAGATCAACTT |
| | | HQTALEHPELSEL | CGAGACCAGGGGCAAGAGGGGCCA |
| | | KTVTGTNPVFAG | GGACGCCATGTACGAGTACATGGCC |
| | | ANYAAWAVNVA | CAGGCCTGCGCCGGCAACAGGGTGA |
| | | QVIDSETADNLEK | GGAGGAGCGTGGGCAGCAGCCTGA |
| | | TTAALSILPGIGSV | GCTGCATCAACCTGGACTGGGACGT |
| | | MGIADGAVHHNT | GATCAGGGACAAGACCAAGACCAA |
| | | EEIVAQSIALSSL | GATCGAGAGCCTGAAGGAGCACGGC |
| | | MVAQAIPLVGEL | CCCATCAAGAACAAGATGAGCGAGA |
| | | VDIGFAAYNFVES | GCCCCAACAAGACCGTGAGCGAGGA |
| | | IINLFQVVHNSYN | GAAGGCCAAGCAGTACCTGGAGGA |
| | | RPAYSPGHKTQPF | GTTCCACCAGACCGCCCTGGAGCAC |
| | | LHDGYAVSWNTV | CCCGAGCTGAGCGAGCTGAAGACCG |
| | | EDSIIRTGFQGESG | TGACCGGCACCAACCCCGTGTTCGC |
| | | HDIKITAENTPLPI | CGGCGCCAACTACGCCGCCTGGGCC |
| | | AGVLLPTIPGKLD | GTGAACGTGGCCCAGGTGATCGACA |
| | | VNKSKTHISVNGR | GCGAGACCGCCGACAACCTGGAGAA |
| | | KIRMRCRAIDGD | GACCACCGCCGCCCTGAGCATCCTG |
| | | VTFCRPKSPVYVG | CCCGGCATCGGCAGCGTGATGGGCA |
| | | NGVHANLHVAFH | TCGCCGACGGCGCCGTGCACCACAA |
| | | RSSSEKIHSNEISS | CACCGAGGAGATCGTGGCCCAGAGC |
| | | DSIGVLGYQKTV | ATCGCCCTGAGCAGCCTGATGGTGG |
| | | DHTKVNSKLSLFF | CCCAGGCCATCCCCCTGGTGGGCGA |
| | | EIKS (SEQ ID NO: | GCTGGTGGACATCGGCTTCGCCGCC |
| | | 630) | TACAACTTCGTGGAGAGCATCATCA |
| | | | ACCTGTTCCAGGTGGTGCACAACAG |
| | | | CTACAACAGGCCCGCCTACAGCCCC |
| | | | GGCCACAAGACCCAGCCCTTCCTGC |
| | | | ACGACGGCTACGCCGTGAGCTGGAA |
| | | | CACCGTGGAGGACAGCATCATCAGG |
| | | | ACCGGCTTCCAGGGCGAGAGCGGCC |
| | | | ACGACATCAAGATCACCGCCGAGAA |
| | | | CACCCCCCTGCCCATCGCCGGCGTG |
| | | | CTGCTGCCCACCATCCCCGGCAAGC |
| | | | TGGACGTGAACAAGAGCAAGACCCA |
| | | | CATCAGCGTGAACGGCAGGAAGATC |
| | | | AGGATGAGGTGCAGGGCCATCGACG |
| | | | GCGACGTGACCTTCTGCAGGCCCAA |
| | | | GAGCCCCGTGTACGTGGGCAACGGC |
| | | | GTGCACGCCAACCTGCACGTGGCCT |
| | | | TCCACAGGAGCAGCAGCGAGAAGAT |
| | | | CCACAGCAACGAGATCAGCAGCGAC |
| | | | AGCATCGGCGTGCTGGGCTACCAGA |
| | | | AGACCGTGGACCACACCAAGGTGAA |
| | | | CAGCAAGCTGAGCCTGTTCTTCGAG |
| | | | ATCAAGAGC (SEQ ID NO: 399) |
| 3 | mumps | GTYRLIPNARANL | GGCACCTACAGGCTGATCCCCAACG |
| | | TA (SEQ ID NO: | CCAGGGCCAACCTGACCGCC (SEQ |
| | | 400) | ID NO: 401) |
| 4 | mumps | PSKFFTISDSATFA | Ccgagcaaattttttaccattagcgatagcgcgacctttgcg |
| | | PGPVSNA (SEQ ID | ccgggcccggtgagcaacgcg |
| | | NO: 402) | (SEQ ID NO: 403) |
| | | PSKLFIMLDNATF | Ccgagcaaactgtttattatgctggataacgcgacctttgcg |
| | | APGPVVNA (SEQ | ccgggcccggtggtgaacgcg |
| | | ID NO: 404) | (SEQ ID NO: 405) |
| | | | Selected examples from Hemagglutinin- |
| | | | neuraminidase (HN) diversity among |
| | | | outbreak strains (table1) Divergence |
| | | | between vaccine strain JL5 and outbreak |
| | | | strains (tab1e2) |
| 5 | Rubella virus | TPPPYQVSCGGES | ACCCCCCCCCCCTACCAGGTGAGCT |
| | (RV) | DRASARVIDPAA | GCGGCGGCGAGAGCGACAGGGCCA |
| | | QS (SEQ ID NO: | GCGCCAGGGTGATCGACCCCGCCGC |
| | | 406) | CCAGAGC (SEQ ID NO: 407) |
| 6 | Hemagglutinin | PEYAYKIVKNKK | CCCGAGTACGCCTACAAGATCGTGA |
| | | MEDGFLQGMVD | AGAACAAGAAGATGGAGGACGGCT |
| | | GWYGHHSNEQGS | TCCTGCAGGGCATGGTGGACGGCTG |
| | | GLMENERTLDKA | GTACGGCCACCACAGCAACGAGCAG |
| | | NPNNDLCSWSDH | GGCAGCGGCCTGATGGAGAACGAG |
| | | EASSNNTNQEDLL | AGGACCCTGGACAAGGCCAACCCCA |
| | | QRESRRKKRIGTS | ACAACGACCTGTGCAGCTGGAGCGA |
| | | TLNQRGNCNTKC | CCACGAGGCCAGCAGCAACAACACC |
| | | QTEEARLKREEVS | AACCAGGAGGACCTGCTGCAGAGGG |
| | | LVKSDQCSNGSL | AGAGCAGGAGGAAGAAGAGGATCG |
| | | QCRANNSTEQVD | GCACCAGCACCCTGAACCAGAGGGG |
| | | (SEQ ID NO: 408) | CAACTGCAACACCAAGTGCCAGACC |
| | | | GAGGAGGCCAGGCTGAAGAGGGAG |
| | | | GAGGTGAGCCTGGTGAAGAGCGACC |
| | | | AGTGCAGCAACGGCAGCCTGCAGTG |
| | | | CAGGGCCAACAACAGCACCGAGCA |
| | | | GGTGGAC (SEQ ID NO: 409) |
| 7 | Neuraminidase | TKSTNSRSGGISG | ACCAAGAGCACCAACAGCAGGAGC |
| | | PDNEAPVGEAPSP | GGCGGCATCAGCGGCCCCGACAACG |
| | | YGDNPRPNDGNN | AGGCCCCCGTGGGCGAGGCCCCCAG |
| | | IRIGSKGYNGIITD | CCCCTACGGCGACAACCCCAGGCCC |
| | | TIEESCSCYPDAK | AACGACGGCAACAACATCAGGATCG |
| | | VVKSVELDSTIWT | GCAGCAAGGGCTACAACGGCATCAT |
| | | SGSSPNQKIITIGW | CACCGACACCATCGAGGAGAGCTGC |
| | | DPNGWTGTPMSP | AGCTGCTACCCCGACGCCAAGGTGG |
| | | NGAYGTDGPSNG | TGAAGAGCGTGGAGCTGGACAGCAC |
| | | QANQHQAESISA | CATCTGGACCAGCGGCAGCAGCCCC |
| | | GNSSLCPIRDNWH | AACCAGAAGATCATCACCATCGGCT |
| | | GSNRSWSWPDGA | GGGACCCCAACGGCTGGACCGGCAC |
| | | E (SEQ ID NO: 410) | CCCCATGAGCCCCAACGGCGCCTAC |
| | | | GGCACCGACGGCCCCAGCAACGGCC |
| | | | AGGCCAACCAGCACCAGGCCGAGA |
| | | | GCATCAGCGCCGGCAACAGCAGCCT |
| | | | GTGCCCCATCAGGGACAACTGGCAC |
| | | | GGCAGCAACAGGAGCTGGAGCTGGC |
| | | | CCGACGGCGCCGAG (SEQ ID NO: |
| | | | 411) |
| 8 | TAP | EKIVLLLAMMEKI | GAGAAGATCGTGCTGCTGCTGGCCA |
| | (transport | VLLLAKCQTPMG | TGATGGAGAAGATCGTGCTGCTGCT |
| | antigen | AIKAVDGVTNKC | GGCCAAGTGCCAGACCCCCATGGGC |
| | presentation) | PYLGSPSF (SEQ | GCCATCAAGGCCGTGGACGGCGTGA |
| | on H5N1 | ID NO: 412) | CCAACAAGTGCCCCTACCTGGGCAG |
| | virus | | CCCCAGCTTC (SEQ ID NO: 413) |
| | hemagglutinin | | |
| 9 | TAP | IRPCFWVELNPNQ | ATCAGGCCCTGCTTCTGGGTGGAGC |
| | (transport | KIITIRPCFWVELI | TGAACCCCAACCAGAAGATCATCAC |
| | antigen | CYPDAGEIT (SEQ | CATCAGGCCCTGCTTCTGGGTGGAG |
| | presentation) | ID NO: 414) | CTGATCTGCTACCCCGACGCCGGCG |
| | on h5n1 virus | | AGATCACC (SEQ ID NO: 415) |
| | neuraminidase | | |
| 10 | hemagglutinin | MEKIVLLLAEKIV | ATGGAGAAGATCGTGCTGCTGCTGG |
| | epitopes | LLLAMCPYLGSPS | CCGAGAAGATCGTGCTGCTGCTGGC |
| | toward class I | FKCQTPMGAIKA | CATGTGCCCCTACCTGGGCAGCCCC |
| | HLA | VDGVTNK (SEQ | AGCTTCAAGTGCCAGACCCCCATGG |
| | | ID NO: 416) | GCGCCATCAAGGCCGTGGACGGCGT |
| | | | GACCAACAAG (SEQ ID NO: 417) |
| 11 | neuraminidase | NPNQKIITICYPDAG | AACCCCAACCAGAAGATCATCACCAT |
| | epitopes | EITIRPCFWVELRPC | CTGCTACCCCGACGCCGGCGAGATCA |
| | toward class I | FWVELI (SEQ ID | CCATCAGGCCCTGCTTCTGGGTGGAG |
| | HLA | NO: 418) | CTGAGGCCCTGCTTCTGGGTGGAGCT |
| | | | GATC (SEQ ID NO: 419) |
| 12 | hemagglutinin | MVSLVKSDQIGTST | ATGGTGAGCCTGGTGAAGAGCGACCA |
| | epitopes | LNQR (SEQ ID NO: | GATCGGCACCAGCACCCTGAACCAGA |
| | toward class II | 420) | GG (SEQ ID NO: 421) |
| | HLA | | |
| 13 | neuraminidase | YNGIITDTI (SEQ ID | TACAACGGCATCATCACCGACACCAT |
| | epitopes | NO: 422) | C (SEQ ID NO: 423) |
| | toward class II | | |
| | HLA | | |
| 14 | hemagglutinin | MEKIVLLLAEKIVL | ATGGAGAAGATCGTGCTGCTGCTGGC |
| | epitope | LLAMMVSLVKSDQ | CGAGAAGATCGTGCTGCTGCTGGCCA |
| | H5N1-bound | CPYLGSPSFIGTSTL | TGATGGTGAGCCTGGTGAAGAGCGAC |
| | class I and | NQRKCQTPMGAIK | CAGTGCCCCTACCTGGGCAGCCCCAG |
| | class II HLA | AVDGVTNK (SEQ | CTTCATCGGCACCAGCACCCTGAACC |
| | | ID NO: 424) | AGAGG (SEQ ID NO: 425) |
| 15 | neuraminidase | NPNQKIITIYNGIIT | AACCCCAACCAGAAGATCATCACCAT |
| | epitope | DTICYPDAGEITIRP | CTACAACGGCATCATCACCGACACCA |
| | H5N1-bound | CFWVELRPCFWVE | TCTGCTACCCCGACGCCGGCGAGATC |
| | class I and | LI (SEQ ID NO: 426) | ACCATCAGGCCCTGCTTCTGGGTGGA |
| | class II HLA | | GCTGAGGCCCTGCTTCTGGGTGGAGC |
| | | | TGATC (SEQ ID NO: 427) |

[1314] Below are additional examples of epitopes that may be integrated into a target gene for immunoepitope taggin:

### References Cited in Example 8

[1315] The following references are incorporated by reference in their entireties.
[1316] 1. X. Wen, K. Wen, D. Cao, G. Li, R. W. Jones, J. Li, S. Szu, Y. Hoshino, L. Yuan, Inclusion of a universal tetanus toxoid CD4(+) T cell epitope P2 significantly enhanced the immunogenicity of recombinant rotavirus ΔVP8* subunit parenteral vaccines. Vaccine 32, 4420-4427 (2014).
[1317] 2. G. Ada, D. Isaacs, Carbohydrate-protein conjugate vaccines. Clin Microbiol Infect 9, 79-85 (2003).
[1318] 3. E. Malito, B. Bursulaya, C. Chen, P. L. Surdo, M. Picchianti, E. Balducci, M. Biancucci, A. Brock, F. Berti, M. J. Bottomley, M. Nissum, P. Costantino, R. Rappuoli, G. Spraggon, Structural basis for lack of toxicity of the diphtheria toxin mutant CRM197. Proceedings of the National Academy of Sciences 109, 5229 (2012).
[1319] 4. J. de Wit, M. E. Emmelot, M. C. M. Poelen, J. Lanfermeijer, W. G. H. Han, C. van Els, P. Kaaijk, The Human CD4(+) T Cell Response against Mumps Virus Targets a Broadly Recognized Nucleoprotein Epitope. J Virol 93, (2019).
[1320] 5. M. May, C. A. Rieder, R. J. Rowe, Emergent lineages of mumps virus suggest the need for a polyvalent vaccine. Int J Infect Dis 66, 1-4 (2018).
[1321] 6. M. Ramamurthy, P. Rajendiran, N. Saravanan, S. Sankar, S. Gopalan, B. Nandagopal, Identification of immunogenic B-cell epitope peptides of rubella virus E1 glycoprotein towards development of highly specific immunoassays and/or vaccine. Conference Abstract, (2019).
[1322] 7. U. S. F. Tambunan, F. R. P. Sipahutar, A. A. Parikesit, D. Kerami, Vaccine Design for H5N1 Based on B- and T-cell Epitope Predictions. Bioinform Biol Insights 10, 27-35 (2016).

### Example 9—In Vivo Delivery of PE Agents

[1323] Precise genome targeting technologies using the CRISPR/Cas9 system have recently been explored in a wide range of applications, including gene therapy. A major limitation to the application of Cas9 and Cas9-based genome-editing agents in gene therapy is the size of Cas9 (>4 kb), impeding its efficient delivery via recombinant adeno-associated virus (rAAV). Recently-developed fusions of Cas9 to reverse transcriptases (“Prime editors”) represent a novel genome editing technology that possesses a number of advantages over existing genome editing methods, including the ability to install any single nucleotide substitution, and to insert or delete any arbitrarily-defined short (<˜20) stretch of nucleotides in a site-specific manner. As such, this method enables editing of human pathogenic variants that have been intractable to correction previously. The delivery of prime editing reagents could enable correction of genetic sequences that cause human disease, or allow for the installation of disease-preventing gene variants.

[1324] This invention describes methods for delivering prime editors into cells in vitro and in vivo. Prime editors have been developed and characterized solely in cultured cells. No known method can deliver prime editors in vivo. The presently disclosed methods for delivering prime editors via rAAV or pre-assembled ribonucleoprotein (RNP) complexes will overcome several barriers to in vivo delivery. For example, the DNA encoding prime editors is larger than the rAAV packaging limit, and so requires special solutions. One such solution is formulating the editor fused to split intein pairs that are packaged into two separate rAAV particles that, when co-delivered to a cell, reconstitute the functional editor protein. Several other special considerations to account for the unique features of prime editing are described, including the optimization of second-site nicking targets and properly packaging prime editors into virus vectors, including lentiviruses and rAAV.

[1325] Distinguishing features include using ribonucleoprotein (RNP) delivery formulations, prime editors and nearby nicking targets can be pre-complexed with their specific sgRNA/PEgRNA. This will enhance the range of possible targetable sites and allow for greater optimization of editing efficiency relative to current data that has used DNA delivery. Using either RNP or mRNA delivery formulations, variant Cas proteins can be used that each complex with their own guide RNA variant. This will also allow for a greater diversity of potential nicking loci, so it is expected that optimization can be achieved for greater efficiency in any given application. Using RNP, it is expected to increase editing specificity base on previous RNP reports (Rees et al., 2017). This would reduce off-target prime editing. Potential architectures for splitting prime editors into two AAV vectors for delivery in vivo or ex vivo are described. Packaging prime editor into a dual AAV system requires optimization of design considerations including split sites, reconstitution methods (such as inteins), and guide expression architecture. Using a mixture of virus and RNP for delivery of prime editor, it is expected that editing will be controlled over time since RNP eventually degrades in vivo which will stop prime editing after RNP is no longer supplied.

[1326] Prime editor ribonucleoprotein (RNP), mRNA with prime editor guide RNA, or DNA can be packaged into lipid nanoparticles, rAAV, or lentivirus and injected, ingested, or inhaled to alter genomic DNA in vivo and ex vivo, including for the purposes of establishing animal models of human disease, testing therapeutic and scientific hypotheses in animal models of human disease, and treating disease in humans.

[1327] Prime editors could feasibly be used to correct a large fraction of all genetic diseases (˜89% of pathogenic human genetic variants in Clinvar), if suitable means of delivery into relevant cell types in vivo are developed. Blood diseases, retinal diseases, and liver diseases are the most likely first applications due to established delivery systems for other reagents. AAV capsids, other evolved or engineered viral vectors, and lipid nanoparticle formulations would need to be used in combination with this invention.

[1328] In certain embodiments, one or more of the prime editor domains (e.g., the napDNAbp domain or the RT domain) could be engineered with an intein sequence.

### Example 10—Use of PE to Identify Off-Target Editing

[1329] There are currently no described methods to detect off-target editing with prime editors (prime editing itself has not been published yet). These methods would allow a researcher to identify potential sites of off-target editing using prime editors, which would be important considerations were this technique used to treat genetic disease in patients.

[1330] Methods described here could also be useful to identify off-targets of Cas nucleases. These off-targets have previously been identified using BLESS, Guide-Seq, CIRCLE-Seq, and Digenome-Seq. However, this method is advantageous in the sensitivity and simplicity of the process.

[1331] The key concept of this aspect is the idea of using prime editing to insert an adapter sequence or primer binding site, templated from a PEgRNA, to enable the rapid identification of genomic off-target modification sites of Cas nucleases or prime editors.

[1332] No method to identify in an unbiased manner prime editing off-target sites is known. This method is distinguished from other techniques that identify nuclease off-target sites because the adapter sequence is inserted in the same event as DNA binding and nicking, simplifying the downstream processing.

[1333] The present invention includes identification of off-target editing sites when editing inside a living cell, in tissue culture or animal models (see FIG. 33). To conduct this method, a PEgRNA is generated that has an identical protospacer to the final desired editor (and, if looking at prime editing off-targets, an identical primer-binding site sequence to the final desired editor), but includes the necessary sequences to install an adapter or primer binding site after reverse transcription by prime editing. In vivo editing is conducted using a prime editor or RT-fused nuclease, and isolate genomic DNA. The genomic DNA is fragmented by enzymatic or mechanical means and append a different adapter to sites of DNA fragmentation. PCR is used to amplify from one adapter to the adapter installed via PEgRNA. The resulting product is deep-sequenced to identify all modified sites.

[1334] The invention also includes identification of off-target editing sites using in vitro modification of genomic DNA (see FIG. 33). To conduct this method, RNP of purified prime editor protein and a PEgRNA is assembled that will install an adapter or primer binding sequence, but is otherwise the same as the PEgRNA of interest. This RNP is incubated with extracted genomic DNA before or after fragmentation of the DNA and attachment of different adapters to sites of DNA breaks. PCR is used to amplify from fragmented site to the adapter that was installed with PE. Deep sequence to identify sites of modification. This in vitro editing method should enhance the sensitivity of detection, because cellular DNA repair will never eliminate the reverse-transcribed DNA adapter added by the prime editor.

[1335] These methods could be used to identify off-target editing for any prime editor, or any genome editor that uses a guideRNA to recognize a target cut site (most Cas nucleases).

[1336] These methods could be applied to all genetic diseases for which genome editors are considered for use in treatment.

### Example 11—Use of PE to Enable Chemical-Induced Dimerization of Target Proteins In Vivo

[1337] The prime editors described herein may also be used to place dimerization-induced biological processes, such as receptor signaling, under control of a convenient small-molecule drug by the genomic integration of genes encoding small-molecule binding proteins with prime editing is described herein. Using the prime editors described herein, the gene sequence encoding a small-molecule binding protein may be inserted within a gene encoding a target protein of interest in a living cell or patient. This edit alone should have no physiological effect. Upon administration of the small-molecule drug, which typically is a dimeric small molecule that can simultaneously bind to two drug-binding protein domains each of which is fused to a copy of the target protein, the small-molecule induces dimerization of the targeted protein. This target protein dimerization event then induces a biological signaling event, such as erythropoiesis or insulin signaling.

### Example 12—Prime Editing: Highly Versatile and Precise Search-and-Replace Genome Editing in Human Cells without Double-Stranded DNA Breaks

[1338] Current genome editing methods can disrupt, delete, or insert target genes with accompanying byproducts of double-stranded DNA breaks using programmable nucleases, and install the four transition point mutations at target loci using base editors. Small insertions, small deletions, and the eight transversion point mutations, however, collectively represent most pathogenic genetic variants but cannot be corrected efficiently and without an excess of byproducts in most cell types. Described herein is prime editing, a highly versatile and precise genome editing method that directly writes new genetic information into a specified DNA site using a catalytically impaired Cas9 fused to an engineered reverse transcriptase, programmed with an engineered prime editing guide RNA (PEgRNA) that both specifies the target site and encodes the desired edit. Greater than 175 distinct edits in human cells were performed to establish that prime editing can make targeted insertions, deletions, all 12 possible types of point mutations, and combinations thereof efficiently (typically 20-60%, up to 77% in unsorted cells) and with low byproducts (typically 1-10%), without requiring double-stranded breaks or donor DNA templates. Prime editing was applied in human cells to correct the primary genetic causes of sickle cell disease (requiring an A⋅T-to-T⋅A transversion in HBB) and Tay-Sachs disease (requiring a 4-base deletion in HEXA), in both cases efficiently reverting the pathogenic genomic alleles to wild-type with minimal byproducts. Prime editing was also used to create human cell lines with these pathogenic HBB transversion and HEXA insertion mutations, to install the G127V mutation in PRNP that confers resistance to prion disease (requiring a G⋅C-to-T⋅A transversion), and to efficiently insert a His6 tag, a FLAG epitope tag, and an extended LoxP site into target loci in human cells. Prime editing offers efficiency and product purity advantages over HDR, and complementary strengths and weaknesses compared to base editing. Consistent with its search-and-replace mechanism, which requires three distinct base-pairing events, prime editing is much less prone to off-target DNA modification at known Cas9 off-target sites than Cas9. Prime editing substantially expands the scope and capabilities of genome editing, and in principle can correct ˜89% of known pathogenic human genetic variants.

[1339] The ability to make virtually any targeted change in the genome of any living cell or organism is a longstanding aspiration of the life sciences. Despite rapid advances in genome editing technologies, the majority of the >75,000 known human genetic variants associated with diseases¹¹¹ cannot be corrected or installed in most therapeutically relevant cells (FIG. 38A). Programmable nucleases such as CRISPR-Cas9 make double-stranded DNA breaks (DSBs) that can disrupt genes by inducing mixtures of insertions and deletions (indels) at target sites¹¹²⁻¹¹⁴. Nucleases can also be used to delete target genes^{115,116}, or insert exogenous genes¹¹⁷⁻¹¹⁹, through homology-independent processes. Double-stranded DNA breaks, however, are also associated with undesired outcomes including complex mixtures of products, translocations¹²⁰, and p53 activation^{121,122}. Moreover, the vast majority of pathogenic alleles differ from their non-pathogenic counterparts by small insertions, deletions, or base substitutions that require much more precise editing technologies to correct (FIG. 38A). Homology-directed repair (HDR) stimulated by nuclease-induced DSBs¹²³ has been widely used to install a variety of precise DNA changes. HDR, however, relies on exogenous donor DNA repair templates, typically generates an excess of indel byproducts from end-joining repair of DSBs, and is inefficient in most therapeutically relevant cell types (T cells and some stem cells being important exceptions)^{124,125}. While enhancing the efficiency and precision of DSB-mediated genome editing remains the focus of promising efforts¹²⁶⁻¹³⁰, these challenges necessitate the exploration of alternative precision genome editing strategies.

[1340] Base editing can efficiently install or correct the four types of transition mutations (C to T, G to A, A to G, and T to C) without requiring DSBs in a wide variety of cell types and organisms, including mammals¹²⁸⁻¹³¹, but cannot currently achieve any of the eight transversion mutations (C to A, C to G, G to C, G to T, A to C, A to T, T to A, and T to G), such as the T⋅A-to-A⋅T mutation needed to directly correct the most common cause of sickle cell disease (HBB E6V)¹³². In addition, no DSB-free method has been reported to perform target deletions, such as the removal of the 4-base duplication that causes Tay-Sachs disease (HEXA 1278+TATC)¹³³, or targeted insertions, such as the precise 3-base insertion required to directly correct the most common cause of cystic fibrosis (CFTR AF508)¹³⁴. Targeted transversion point mutations, insertions, and deletions thus are difficult to install or correct efficiently and without excess byproducts in most cell types, even though they collectively account for most known pathogenic alleles (FIG. 38A).

[1341] Described herein is the development of prime editing, a new “search-and-replace” genome editing technology that mediates targeted insertions, deletions, and all 12 possible base-to-base conversions at targeted loci in human cells without requiring double-stranded DNA breaks, or donor DNA templates. Prime editors, initially exemplified by PE1, use a reverse transcriptase fused to a programmable nickase and a prime editing extended guide RNA (PEgRNA) to directly copy genetic information from the extension on the PEgRNA into the target genomic locus. A second-generation prime editor (PE2) uses an engineered reverse transcriptase to substantially increase editing efficiencies with minimal (typically <2%) indel formation, while a third-generation PE3 system adds a second guide RNA to nick the non-edited strand, thereby favoring replacement of the non-edited strand and further increasing editing efficiency, typically, to about 20-50% in human cells with about 1-10% indel formation. PE3 offers far fewer byproducts and higher or similar efficiency compared to optimized Cas9 nuclease-initiated HDR, and offers complementary strengths and weaknesses compared to current-generation base editors.

[1342] PE3 was applied at genomic loci in human HEK293T cells to achieve efficient conversion of HBB E6V to wild-type HBB, deletion of the inserted TATC to restore HEXA 1278+TATC to wild-type HEXA, installation in PRNP of the G127V mutation that confers resistance to prion disease¹³⁵ (requiring a G⋅C-to-T⋅A transversion), and targeted insertion of a His6 tag (18 bp), FLAG epitope tag (24 bp), and extended LoxP site for Cre-mediated recombination (44 bp). Prime editing was also successful in three other human cell lines, as well as in post-mitotic primary mouse cortical neurons, with varying efficiencies. Due to a high degree of flexibility in the distance between the initial nick and location of the edit, prime editing is not substantially constrained by the PAM requirement of Cas9 and in principle can target the vast majority of genomic loci. Off-target prime editing is much rarer than off-target Cas9 editing at known Cas9 off-target loci, likely due to the requirement of three distinct DNA base pairing events in order for productive prime editing to take place. By enabling precise targeted insertions, deletions, and all 12 possible classes of point mutations at a wide variety of genomic loci without the need for DSBs or donor DNA templates, prime editing has the potential to advance the study and correction of many gene variants.

### Results

[1343] Strategy for Transferring Information from an Extended Guide RNA into a Target DNA Locus

[1344] Cas9 targets DNA using a guide RNA containing a spacer sequence that hybridizes to the target DNA site^{112-114,136,137}. The aim was to engineer guide RNAs to both specify the DNA target as in natural CRISPR systems^{138,139}, and also to contain new genetic information that replaces the corresponding DNA nucleotides at the target locus. The direct transfer of genetic information from an extended guide RNA into a specified DNA site, followed by replacement of the original unedited DNA, in principle could provide a general means of installing targeted DNA sequence changes in living cells, without dependence on DSBs or donor DNA templates. To achieve this direct information transfer, the aim was to use genomic DNA, nicked at the target site to expose a 3′-hydroxyl group, to prime the reverse transcription of the genetic information from an extension on the engineered guide RNA (hereafter referred to as the prime editing guide RNA, or PEgRNA) directly into the target site (FIG. 38A).

[1345] These initial steps of nicking and reverse transcription, which resemble mechanisms used by some natural mobile genetic elements¹⁴⁰, result in a branched intermediate with two redundant single-stranded DNA flaps on one strand: a 5′ flap that contains the unedited DNA sequence, and a 3′ flap that contains the edited sequence copied from the PEgRNA (FIG. 38B). To achieve a successful edit, this branched intermediate must be resolved so that the edited 3′ flap replaces the unedited 5′ flap. While hybridization of the 5′ flap with the unedited strand is likely to be thermodynamically favored since the edited 3′ flap can make fewer base pairs with the unedited strand, 5′ flaps are the preferred substrate for structure-specific endonucleases such as FEN1¹⁴¹ which excises 5′ flaps generated during lagging-strand DNA synthesis and long-patch base excision repair. It was reasoned that preferential 5′ flap excision and 3′ flap ligation could drive the incorporation of the edited DNA strand, creating heteroduplex DNA containing one edited strand and one unedited strand (FIG. 38B).

[1346] Permanent installation of the edit could arise from subsequent DNA repair that resolves the mismatch between the two DNA strands in a manner that copies the information in the edited strand to the complementary DNA strand (FIG. 38C). Based on a similar strategy developed to maximize the efficiency of DNA base editing¹³¹⁻¹³³, it was envisioned that nicking the non-edited DNA strand, far enough from the site of the initial nick to minimize double-strand break formation, might bias DNA repair to preferentially replace the non-edited strand.

### Validation of Prime Editing Steps In Vitro and in Yeast Cells

[1347] Following cleavage of the PAM-containing DNA strand by the RuvC nuclease domain of Cas9, the PAM-distal fragment of this strand can dissociate from otherwise stable Cas9:sgRNA:DNA complexes¹⁴³. It was hypothesized that the 3′ end of this liberated strand might be sufficiently accessible to prime DNA polymerization. Guide RNA engineering efforts¹⁴⁴⁻¹⁴⁶ and crystal structures of Cas9:sgRNA:DNA complexes¹⁴⁷⁻¹⁴⁹ suggest that the 5′ and 3′ termini of the sgRNA can be extended without abolishing Cas9:sgRNA activity. PEgRNAs were designed by extending sgRNAs to include two critical components: a primer binding site (PBS) that allows the 3′ end of the nicked DNA strand to hybridize to the PEgRNA, and a reverse transcriptase (RT) template containing the desired edit that would be directly copied into the genomic DNA site as the 3′ end of the nicked DNA strand is extended across the RNA template by a polymerase (FIG. 38C).

[1348] These hypotheses were tested in vitro using purified S. pyogenes Cas9 protein. A series of PEgRNA candidates were constructed by extending sgRNAs on either terminus with a PBS sequence (5 to 6 nucleotides, nt) and an RT template (7 to 22 nt). It was confirmed that 5′-extended PEgRNAs direct Cas9 binding to target DNA, and that both 5′-extended PEgRNAs and 3′-extended PEgRNAs support Cas9-mediated target nicking in vitro and DNA cleavage activities in mammalian cells (FIGS. 44A-44C). These candidate PEgRNA designs were tested using pre-nicked 5′-Cy5-labeled dsDNA substrates, catalytically dead Cas9 (dCas9), and a commercial variant of Moloney murine leukemia virus (M-MLV) reverse transcriptase (FIG. 44D). When all components were present, efficient conversion of the fluorescently labeled DNA strand into longer DNA products with gel mobilities, consistent with reverse transcription along the RT template, (FIG. 38D, FIGS. 44D-44E) was observed. Products of desired length were formed with either 5′-extended or 3′-extended PEgRNAs (FIGS. 38D-38E). Omission of dCas9 led to nick translation products derived from reverse transcriptase-mediated DNA polymerization on the DNA template, with no PEgRNA information transfer (FIG. 38D). No DNA polymerization products were observed when the PEgRNA was replaced by a conventional sgRNA, confirming the necessity of the PBS and RT template components of the PEgRNA (FIG. 38D). These results demonstrate that Cas9-mediated DNA melting exposes a single-stranded R-loop that, if nicked, is competent to prime reverse transcription from either a 5′-extended or 3′-extended PEgRNA.

[1349] Next, non-nicked dsDNA substrates were tested with a Cas9 nickase (H840A mutant) that exclusively nicks the PAM-containing strand¹¹². In these reactions, 5′-extended PEgRNAs generated reverse transcription products inefficiently, possibly due to impaired Cas9 nickase activity (FIG. 44F). However, 3′-extended PEgRNAs enabled robust Cas9 nicking and efficient reverse transcription (FIG. 38E). The use of 3′-extended PEgRNAs generated only a single apparent product, despite the potential, in principle, for reverse transcription to terminate anywhere within the remainder of the PEgRNA. DNA sequencing of the products of reactions with Cas9 nickase, RT, and 3′-extended PEgRNAs revealed that the complete RT template sequence was reverse transcribed into the DNA substrate (FIG. 44G). These experiments established that 3′-extended PEgRNAs can template the reverse transcription of new DNA strands while retaining the ability to direct Cas9 nickase activity.

[1350] To evaluate the eukaryotic cell DNA repair outcomes of 3′ flaps produced by PEgRNA-programmed reverse transcription in vitro, DNA nicking and reverse transcription using PEgRNAs, Cas9 nickase, and RT in vitro on reporter plasmid substrates were performed, and the reaction products were then transformed into yeast (S. cerevisiae) cells (FIG. 45A). Encouragingly, when plasmids were edited in vitro with 3′-extended PEgRNAs encoding a T⋅A-to-A⋅T transversion that corrects the premature stop codon, 37% of yeast transformants expressed both GFP and mCherry proteins (FIG. 38F, FIG. 45C). Consistent with the results in FIG. 38E and FIG. 44F, editing reactions carried out in vitro with 5′-extended PEgRNAs yielded fewer GFP and mCherry double-positive colonies (9%) than those with 3′-extended PEgRNAs (FIG. 38F and FIG. 45D). Productive editing was also observed using 3′-extended PEgRNAs that insert a single nucleotide (15% double-positive transformants) or delete a single nucleotide (29% double-positive transformants) to correct frameshift mutations (FIG. 38F and FIGS. 45E-45F). DNA sequencing of edited plasmids recovered from double-positive yeast colonies confirmed that the encoded transversion edit occurred at the desired sequence position (FIG. 45G). These results demonstrate that DNA repair in eukaryotic cells can resolve 3′ DNA flaps arising from prime editing to incorporate precise DNA edits including transversions, insertions, and deletions.

### Design of Prime Editor 1 (PE1)

[1351] Encouraged by the results in vitro and in yeast, a prime editing system with a minimum number of components capable of editing genomic DNA in mammalian cells was sought for development. It was hypothesized that 3′-extended PEgRNAs (hereafter referred to simply as PEgRNAs, FIG. 39A) and direct fusions of Cas9 H840A to reverse transcriptase via a flexible linker may constitute a functional two-component prime editing system. HEK293T (immortalized human embryonic kidney) cells were transfected with one plasmid encoding a fusion of wild-type M-MLV reverse transcriptase to either terminus of Cas9 H840A nickase as well as a second plasmid encoding a PEgRNA. Initial attempts led to no detectable T⋅A-to-A⋅T conversion at the HEK3 target locus.

[1352] Extension of the PBS in the PEgRNA to 8-15 bases (FIG. 39A), however, led to detectable T⋅A-to-A⋅T editing at the HEK3 target site (FIG. 39B), with higher efficiencies for prime editor constructs in which the RT was fused to the C-terminus of Cas9 nickase (3.7% maximal T⋅A-to-A⋅T conversion with PBS lengths ranging from 8-15 nt) compared to N-terminal RT-Cas9 nickase fusions (1.3% maximal T⋅A-to-A⋅T conversion) (FIG. 39B; all mammalian cell data herein reports values for the entire treated cell population, without selection or sorting, unless otherwise specified). These results suggest that wild-type M-MLV RT fused to Cas9 requires longer PBS sequences for genome editing in human cells compared to what is required in vitro using the commercial variant of M-MLV RT supplied in trans. This first-generation wild-type M-MLV reverse transcriptase fused to the C-terminus of Cas9 H840A nickase was designated as PE1.

[1353] The ability of PE1 to precisely introduce transversion point mutations at four additional genomic target sites specified by the PEgRNA (FIG. 39C) was tested. Similar to editing at the HEK3 locus, efficiency at these genomic sites was dependent on PBS length, with maximal editing efficiencies ranging from 0.7-5.5% (FIG. 39C). Indels from PE1 were low, averaging 0.2±0.1% for the five sites under conditions that maximized each site's editing efficiency (FIG. 46A). PE1 was also able to install targeted insertions and deletions, exemplified by a single-nucleotide deletion (4.0% efficiency), a single-nucleotide insertion (9.7%), and a three-nucleotide insertion (17%) at the HEK3 locus (FIG. 39C). These results establish the ability of PE1 to directly install targeted transversions, insertions, and deletions without requiring double-stranded DNA breaks or DNA templates.

### Design of Prime Editor 2 (PE2)

[1354] While PE1 can install a variety of edits at several loci in HEK293T cells, editing efficiencies were generally low (typically ≤5%) (FIG. 39C). It was hypothesized that engineering the reverse transcriptase in PE1 might improve the efficiency of DNA synthesis within the unique conformational constraints of the prime editing complex, resulting in higher genome editing yields. M-MLV RT mutations have been previously reported that increase enzyme thermostability^{150,151}, processivity¹⁵⁰, and DNA:RNA heteroduplex substrate affinityis¹⁵², and that inactivate RNaseH activity¹⁵³. 19 PE1 variants were constructed containing a variety of reverse transcriptase mutations to evaluate their prime editing efficiency in human cells.

[1355] First, a series of M-MLV RT variants that previously emerged from laboratory evolution for their ability to support reverse transcription at elevated temperatures¹⁵⁰ were investigated. Successive introduction of three of these amino acid substitutions (D200N, L603W, and T330P) into M-MLV RT, hereafter referred to as M3, led to a 6.8-fold average increase in transversion and insertion editing efficiency across five genomic loci in HEK293T cells compared to that of PE1 (FIGS. 47A-47S).

[1356] Next, in combination with M3, additional reverse transcriptase mutations that were previously shown to enhance binding to template:PBS complex, enzyme processivity, and thermostability¹⁵² were tested. Among the 14 additional mutants analyzed, a variant with T306K and W313F substitutions, in addition to the M3 mutations, improved editing efficiency an additional 1.3-fold to 3.0-fold compared to M3 for six transversion or insertion edits across five genomic sites in human cells (FIGS. 47A-47S). This pentamutant of M-MLV reverse transcriptase incorporated into the PE1 architecture (Cas9 H840A-M-MLV RT (D200N L603W T330P T306K W313F)) is hereafter referred to as PE2.

[1357] PE2 installs single-nucleotide transversion, insertion, and deletion mutations with substantially higher efficiency than PE1 (FIG. 39C), and is compatible with shorter PBS PEgRNA sequences (FIG. 39C), consistent with an enhanced ability to productively engage transient genomic DNA:PBS complexes. On average, PE2 led to a 1.6- to 5.1-fold improvement in prime editing point mutation efficiency over PE1 (FIG. 39C), and in some cases dramatically improved editing yields up to 46-fold (FIG. 47F and FIG. 47I). PE2 also effected targeted insertions and deletions more efficiently than PE1, achieving the targeted insertion of the 24-bp FLAG epitope tag at the HEK3 locus with 4.5% efficiency, a 15-fold improvement over the efficiency of installing this insertion with PE1 (FIG. 47D), and mediated a 1-bp deletion in HEK3 with 8.6% efficiency, 2.1-fold higher than that of PE1 (FIG. 39C). These results establish PE2 as a more efficient prime editor than PE1.

### Optimization of PEgRNA Features

[1358] The relationship between PEgRNA architecture and prime editing efficiency was systematically probed at five genomic loci in HEK293T cells with PE2 (FIG. 39C). In general, priming sites with lower GC content required longer PBS sequences (EMX1 and RNF2, containing 40% and 30% GC content, respectively, in the first 10 nt upstream of the nick), whereas those with greater GC content supported prime editing with shorter PBS sequences (HEK4 and FANCF, containing 80% and 60% GC content, respectively, in the first 10 nt upstream of the nick) (FIG. 39C), consistent with the energetic requirements for hybridization of the nicked DNA strand to the PEgRNA PBS. No PBS length or GC content level was strictly predictive of prime editing efficiency, and other factors such as secondary structure in the DNA primer or PEgRNA extension may also influence editing activity. It is recommended to start with a PBS length of ˜13 nt for a typical target sequence, and exploring different PBS lengths if the sequence deviates from ˜40-60% GC content. When necessary, optimal PBS sequences should be determined empirically.

[1359] Next, the performance determinants of the RT template portion of the PEgRNA were studied. PEgRNAs with RT templates ranging from 10-20 nt in length were systemically evaluated at five genomic target sites using PE2 (FIG. 39D) and with longer RT templates as long as 31 nt at three genomic sites (FIGS. 48A-48C). As with PBS length, RT template length also could be varied to maximize prime editing efficiency, although in general many RT template lengths ≥10 nt long support more efficient prime editing (FIG. 39D). Since some target sites preferred longer RT templates (>15 nt) to achieve higher editing efficiencies (FANCF, EMX1), while other loci preferred short RT templates (HEK3, HEK4) (FIG. 39D), it is recommend both short and long RT templates be tested when optimizing a PEgRNA, starting with ˜10-16 nt.

[1360] Importantly, RT templates that place a C as the nucleotide adjacent to the terminal hairpin of the sgRNA scaffold generally resulted in lower editing efficiency compared to other PEgRNAs with RT templates of similar length (FIGS. 48A-48C). Based on the structure of sgRNAs bound to Cas9^{148,149}, it was speculated that the presence of a C as the first nucleotide of the 3′ extension of a canonical sgRNA can disrupt the sgRNA scaffold fold by pairing with G81, a nucleotide that natively forms a pi stack with Tyr 1356 in Cas9 and a non-canonical base pair with sgRNA A68. Since many RT template lengths support prime editing, it is recommended to choose PEgRNAs in which the first base of the 3′ extension (the last reverse-transcribed base of the RT template) is not C.

### Design of Prime Editor 3 Systems (PE3 and PE3b)

[1361] While PE2 can transfer genetic information from the PEgRNA to the target locus more efficiently than PE1, the manner in which the cell resolves the resulting heteroduplex DNA created by one edited strand and one unedited strand determines if the edit is durable. A previous development of base editing faced a similar challenge since the initial product of cytosine or adenine deamination is heteroduplex DNA containing one edited and one non-edited strand. To increase the efficiency of base editing, a Cas9 D10A nickase was used to introduce a nick into the non-edited strand and to direct DNA repair to that strand, using the edited strand as a template^{129,130,142}. To exploit this principle to enhance prime editing efficiencies, a similar strategy of nicking the non-edited strand using the Cas9 H840A nickase already present in PE2 and a simple sgRNA to induce preferential replacement of the non-edited strand by the cell (FIG. 40A) was tested. Since the edited DNA strand was also nicked to initiate prime editing, a variety of sgRNA-programmed nick locations were tested on the non-edited strand to minimize the production of double-stranded DNA breaks that lead to indels.

[1362] This PE3 strategy was first tested at five genomic sites in HEK293T cells by screening sgRNAs that induce nicks located 14 to 116 bases from the site of the PEgRNA-induced nick, either 5′ or 3′ of the PAM. In four of the five sites tested, nicking the non-edited strand increased the amount of indel-free prime editing products compared to the PE2 system by 1.5- to 4.2-fold, to as high as 55% (FIG. 40B). While the optimal nicking position varied depending on the genomic site, nicks positioned 3′ of the PAM (positive distances in FIG. 40B) approximately 40-90 bp from the PEgRNA-induced nick generally produced favorable increases in prime editing efficiency (averaging 41%) without excess indel formation (6.8% average indels for the sgRNA resulting in the highest editing efficiency for each of the five sites tested) (FIG. 40B). As expected, at some sites, placement of the non-edited strand nick within 40 bp of the PEgRNA-induced nick led to large increases in indel formation up to 22% (FIG. 40B), presumably due to the formation of a double-strand break from nicking both strands close together. At other sites, however, nicking as close as 14 bp away from the PEgRNA-induced nick produced only 5% indels (FIG. 40B), suggesting that locus-dependent factors control conversion of proximal dual nicks into double-strand DNA breaks. At one tested site (HEK4), complementary strand nicks either provided no benefit or led to indel levels that surpassed editing efficiency (up to 26%), even when placed at distances >70 bp from the PEgRNA-induced nick, consistent with an unusual propensity of the edited strand at that site to be nicked by the cell, or to be ligated inefficiently. It is recommend to start with non-edited strand nicks approximately 50 bp from the PEgRNA-mediated nick, and to test alternative nick locations if indel frequencies exceed acceptable levels.

[1363] This model for how complementary strand nicking improved prime editing efficiency (FIG. 40A) predicted that nicking the non-edited strand only after edited strand flap resolution could minimize the presence of concurrent nicks, decreasing the frequency of double-strand breaks that go on to form indels. To achieve temporal control over non-edited strand nicking, sgRNAs with spacer sequences that match the edited strand, but not the original allele, were designed. Using this strategy, referred to hereafter as PE3b, mismatches between the spacer and the unedited allele should disfavor nicking by the sgRNA until after the editing event on the PAM strand takes place. This PE3b approach was tested with five different edits at three genomic sites in HEK293T cells and compared outcomes to those achieved with PE2 and PE3 systems. In all cases, PE3b was associated with substantially lower levels of indels compared to PE3 (3.5- to 30-fold, averaging 12-fold lower indels, or 0.85%), without any evident decrease in overall editing efficiency compared to PE3 (FIG. 40C). Therefore, when the edit lay within a second protospacer, the PE3b system could decrease indels while still improving editing efficiency compared to PE2, often to levels similar to those of PE3 (FIG. 40C).

[1364] Together, these findings established that PE3 systems (Cas9 nickase-optimized reverse transcriptase+PEgRNA+sgRNA) improved editing efficiencies ˜3-fold compared with PE2 (FIGS. 40B-40C). PE3 was accompanied by wider ranges of indels than PE2, as expected given the additional nicking activity of PE3. The use of PE3 is recommended when prioritizing prime editing efficiency. When minimization of indels is critical, PE2 offers ˜10-fold lower indel frequencies. When it is possible to use a sgRNA that recognizes the installed edit to nick the non-edited strand, the PE3b system can achieve PE3-like editing levels while greatly reducing indel formation.

[1365] To demonstrate the targeting scope and versatility of prime editing with PE3, the installation of all possible single nucleotide substitutions across the +1 to +8 positions (counting the first base 3′ of the PEgRNA-induced nick as position +1) of the HEK3 target site using PE3 and PEgRNAs with 10-nucleotide RT templates (FIG. 41A) was explored. Collectively, these 24 distinct edits cover all four transition mutations and all eight transversion mutations, and proceed with editing efficiencies (containing no indels) averaging 33±7.9% (ranging between 14% and 48%), with an average of 7.5±1.8% indels.

[1366] Importantly, long-distance RT templates could also give rise to efficient prime editing with PE3. For example, using PE3 with a 34-nt RT template, point mutations were installed at positions +12, +14, +17, +20, +23, +24, +26, +30, and +33 (12 to 33 bases from the PEgRNA-induced nick) in the HEK3 locus with an average of 36±8.7% efficiency and 8.6±2.0% indels (FIG. 41B). Although edits beyond the +10 position at other loci were not attempted, other RT templates ≥30 nt at three alternative sites also support efficient editing (FIGS. 48A-C). The viability of long RT templates enabled efficient prime editing for dozens of nucleotides from the initial nick site. Since an NGG PAM on either DNA strand occurs on average every ˜8 bp, far less than maximum distances between the edit and the PAM that support efficient prime editing, prime editing is not substantially constrained by the availability of a nearby PAM sequence, in contrast with other precision genome editing methods^{125,142,154}. Given the presumed relationship between RNA secondary structure and prime editing efficiency, when designing PEgRNAs for long-range edits it is prudent to test RT templates of various lengths and, if necessary, sequence compositions (e.g., synonymous codons) to optimize editing efficiency.

[1367] To further test the scope and limitations of the PE3 system for introducing transition and transversion point mutations, 72 additional edits covering all 12 possible types of point mutations across six additional genomic target sites (FIG. 41C-41H) were tested. Overall, indel-free editing efficiency averaged 25±14%, while indel formation averaged 8.3±7.5%. Since the PEgRNA RT template included the PAM sequence, prime editing could induce changes to the PAM sequence. In these cases, higher editing efficiency (averaging 39±9.7%) and lower indel generation (averaging 5.0±2.9%) were observed (FIGS. 41A-41K, point mutations at positions +5 or +6). This increase in efficiency and decrease in indel formation for PAM edits may arise from the inability of the Cas9 nickase to re-bind and nick the edited strand prior to the repair of the complementary strand. Since prime editing supports combination edits with no apparent loss of editing efficiency, editing the PAM, in addition to other desired changes, when possible, is recommended.

[1368] Next, 14 targeted small insertions and 14 targeted small deletions at seven genomic sites using PE3 (FIG. 41I) were performed. Targeted 1-bp insertions proceeded with an average efficiency of 32±9.8%, while 3-bp insertions were installed with an average efficiency of 39±16%. Targeted 1-bp and 3-bp deletions were also efficient, proceeding with an average yield of 29±14% and 32±11%, respectively. Indel generation (beyond the targeted insertion or deletion) averaged 6.8±5.4%. Since insertions and deletions introduced between positions +1 and +6 alter the position or the structure of the PAM, it was speculated that insertion and deletion edits in this range are typically more efficient due to the inability of Cas9 nickase to re-bind and nick the edited DNA strand prior to repair of the complementary strand, similar to point mutations that edit the PAM.

[1369] PE3 was also tested for its ability to mediate larger precise deletions of 5 bp to 80 bp at the HEK3 site (FIG. 41J). Very high editing efficiencies (52 to 78%) were observed for 5-, 10-, and 15-bp deletions when using a 13-nt PBS and an RT template that contained 29, 24, or 19 bp of homology to the target locus, respectively. Using a 26-nt RT template supported a larger deletion of 25 bp with 72±4.2% efficiency, while a 20-nt RT template enabled an 80-bp deletion with an efficiency of 52±3.8%. These targeted deletions were accompanied by indel frequencies averaging 11±4.8% (FIG. 41J).

[1370] Finally, the ability of PE3 to mediate 12 combinations of multiple edits at the same target locus consisting of insertions and deletions, insertions and point mutations, deletions and point mutations, or two point mutations across three genomic sites was tested. These combination edits were very efficient, averaging 55% of the target edit with 6.4% indels (FIG. 41K), and demonstrating the ability of prime editing to make combinations of precision insertions, deletions, and point mutations at individual target sites with high efficiency and low indel frequencies.

[1371] Together, the examples in FIGS. 41A-41K represent 156 distinct transition, transversion, insertion, deletion, and combination edits across seven human genomic loci. These findings establish the versatility, precision, and targeting flexibility of prime editing.

Prime Editing Compared with Base Editing

[1372] Current-generation cytidine base editors (CBEs) and adenine base editors (ABEs) can install C⋅G-to-T⋅A transition mutations and A⋅T-to-G⋅C transition mutations with high efficiency and low indels^{129,130,142}. The application of base editing can be limited by the presence of multiple cytidine or adenine bases within the base editing activity window (typically ˜5-bp wide), which gives rise to unwanted bystander edits^{129,130,142,155}, or by the absence of a PAM positioned approximately 15±2 nt from the target nucleotide^{142,156}. It was anticipated that prime editing could be particularly useful for precise installation of transitions mutations without bystander edits, or when the lack of suitably positioned PAMs precludes favorable positioning the target nucleotide within the CBE or ABE activity window.

[1373] Prime editing and cytosine base editing was compared by editing three genomic loci that contain multiple target cytidines in the canonical base editing window (protospacer positions 4-8, counting the PAM as positions 21-23) using optimized CBEs¹⁵⁷ without nickase activity (BE2max) or with nickase activity (BE4max), or using the analogous PE2 and PE3 prime editing systems. Among the nine total target cytosines within the base editing windows of the three sites, BE4max yielded 2.2-fold higher average total C⋅G-to-T⋅A conversion than PE3 for bases in the center of the base editing window (protospacer positions 5-7, FIG. 42A). Likewise, non-nicking BE2max outperformed PE2 by 1.4-fold on average at these well-positioned bases (FIG. 42A). However, PE3 outperformed BE4max by 2.7-fold, and PE2 outperformed BE2max by 2.0-fold, for cytosines beyond the center of the base editing window (average editing of 40±17% for PE3 vs. 15±18% for BE4max, and 22±11% for PE2 vs. 11±13% for BE2max). Overall, indel frequencies for PE2 were very low (averaging 0.86±0.47%), and for PE3 were similar to or modestly higher than that of BE4max (BE4max range: 2.5% to 14%; PE3 range: 2.5% to 21%) (FIG. 42B).

[1374] When comparing the efficiency of base editing to prime editing for installation of precise C⋅G-to-T⋅A edits (without any bystander editing), the efficiency of prime editing greatly exceeded that of base editing at the above sites, which like most genomic DNA sites, contain multiple cytosines within the −5-bp base editing window (FIG. 42C). At these sites, such as EMX1, which contains cytosines at protospacer positions C5, C6, and C7, BE4max generated few products containing only the single target base pair conversion with no bystander edits. In contrast, prime editing at this site could be used to selectively install a C⋅G-to-T⋅A edit at any position or combination of positions (C5, C6, C7, C5+C6, C6+C7, C5+C7, or C5+C6+C7) (FIG. 42C). All precise one-base or two-base edits (that is, edits that do not modify any other nearby bases) were much more efficient with PE3 or PE2 than with BE4max or BE2, respectively, while the three-base C⋅G-to-T⋅A edit was more efficient with BE4max (FIG. 42C), reflecting the propensity of base editors to edit all target bases within the activity window. Taken together, these results demonstrate that cytosine base editors can result in higher levels of editing at optimally positioned target bases than PE2 or PE3, but prime editing can outperform base editing at non-optimally positioned target bases, and can edit with much higher precision with multiple editable bases.

[1375] A⋅T-to-G⋅C editing was compared at two genomic loci by an optimized non-nicking ABE (ABEmax¹⁵² with a dCas9 instead of a Cas9 nickase, hereafter referred to as ABEdmax) versus PE2, and by the optimized nicking adenine base editor ABEmax versus PE3. At a site that contains two target adenines in the base editing window (HEK3), ABEs were more efficient than PE2 or PE3 for conversion of A5, but PE3 was more efficient for conversion of A8, which lies at the edge of the ABEmax editing window (FIG. 42D). When comparing the efficiency of precision edits in which only a single adenine is converted, PE3 outperformed ABEmax at both A5 and A8 (FIG. 42E). Overall, ABEs produced far fewer indels at HEK3 than prime editors (0.19±0.02% for ABEdmax vs. 1.5±0.46% for PE2, and 0.53±0.16% for ABEmax vs. 11±2.3% for PE3, FIG. 42F). At FANCF, in which only a single A is present within the base editing window, ABE2 and ABEmax outperformed their prime editing counterparts in total target base pair conversion by 1.8- to 2.9-fold, with virtually all edited products from both base editing and prime editing containing only the precise edit (FIGS. 42D-42E). As with the HEK3 site, ABEs produced far fewer indels at the FANCF site (FIG. 42F).

[1376] Collectively, these results indicate that base editing and prime editing offer complementary strengths and weaknesses for making targeted transition mutations. For cases in which a single target nucleotide is present within the base editing window, or when bystander edits are acceptable, current base editors are typically more efficient and result in fewer indels than prime editors. When multiple cytosines or adenines are present and bystander edits are undesirable, or when target bases are poorly positioned for base editing relative to available PAMs, prime editors offer substantial advantages.

### Off-Target Prime Editing

[1377] To result in productive editing, prime editing requires target locus:PEgRNA spacer complementary for the Cas9 domain to bind, target locus:PEgRNA PBS complementarity for PEgRNA-primed reverse transcription to initiate, and target locus:reverse transcriptase product complementarity for flap resolution. It was hypothesized that these three distinct DNA hybridization requirements may minimize off-target prime editing compared to that of other genome editing methods. To test this possibility, HEK293T cells were treated with PE3 or PE2 and 16 total PEgRNAs designed to target four on-target genomic loci, with Cas9 and the four corresponding sgRNAs targeting the same protospacers, or with Cas9 and the same 16 PEgRNAs. These four target loci were chosen because each has at least four well-characterized off-target sites for which Cas9 and the corresponding on-target sgRNA in HEK293T cells is known to cause substantial off-target DNA modificationii^{118,159}. Following treatment, the four on-target loci and the top four known Cas9 off-target sites for each on-target spacer, were sequenced, for a total of 16 off-target sites (Table 1).

[1378] Consistent with previous studies¹¹¹, Cas9 and the four target sgRNAs modified all 16 of the previously reported off-target loci (FIG. 42G). Cas9 off-target modification efficiency among the four off-target sites for the HEK3 target locus averaged 16%. Cas9 and the sgRNA targeting HEK4 resulted in an average of 60% modification of the four tested known off-target sites. Likewise, off-target sites for EMX1 and FANCF were modified by Cas9:sgRNA at an average frequency of 48% and 4.3%, respectively (FIG. 42G). It was noted that PEgRNAs with Cas9 nuclease modified on-target sites at similar (1- to 1.5-fold lower) efficiency on average compared to sgRNAs, while PEgRNAs with Cas9 nuclease modified off-target sites at ˜4-fold lower average efficiency than sgRNAs.

[1379] Strikingly, PE3 or PE2 with the same 16 tested PEgRNAs containing these four target spacers resulted in much lower off-target editing (FIG. 42H). Of the 16 sites known to undergo off-target editing by Cas9+sgRNA, PE3+PEgRNAs or PE2+PEgRNAs resulted in detectable off-target prime editing at only 3 of 16 off-target sites, with only 1 of 16 showing off-target editing efficiency ≥1% (FIG. 42H). Average off-target prime editing for the PEgRNAs targeting HEK3, HEK4, EMX1, and FANCF at these 16 known Cas9 off-target sites was <0.1%, <2.2±5.2%, <0.1%, and <0.13±0.11%, respectively (FIG. 42H). Notably, at the HEK4 off-target 3 site that Cas9+PEgRNA1 edits with 97% efficiency, PE2+PEgRNA1 results in only 0.7% off-target editing despite sharing the same spacer sequence, demonstrating how the two additional DNA hybridization events required for prime editing compared to Cas9 editing can greatly reduce off-target editing. Taken together, these results suggest that PE3 and PEgRNAs induce much lower off-target DNA editing in human cells than Cas9 and sgRNAs that target the same protospacers.

[1380] Reverse transcription of 3′-extended PEgRNAs in principle can proceed into the guide RNA scaffold. If the resulting 3′ flap, despite a lack of complementary at its 3′ end with the unedited DNA strand, is incorporated into the target locus, the outcome is insertion of PEgRNA scaffold nucleotides that contributes to indel frequency. We analyzed sequencing data from 66 PE3-mediated editing experiments at four loci in HEK293T cells and observed PEgRNA scaffold insertion at a low frequency, averaging 1.7±1.5% total insertion of any number of PEgRNA scaffold nucleotides (FIGS. 56A-56D). It is speculated that inaccessibility of the guide RNA scaffold to the reverse transcriptase due to Cas9 domain binding, as well as cellular excision during flap resolution of the mismatched 3′ end of the 3′ flap that results from PEgRNA scaffold reverse transcription, minimizes products that incorporate PEgRNA scaffold nucleotides. While such events are rare, future efforts to engineer PEgRNAs or prime editor proteins that minimize PEgRNA scaffold incorporation may further decrease indel frequencies.

[1381] Deaminases in some base editors can act in a Cas9-independent manner, resulting in low-level but widespread off-target DNA editing among first-generation CBEs (but not ABEs)¹⁶⁰⁻¹⁶² and off-target RNA editing among first-generation CBEs and ABEs¹⁶³⁻¹⁶⁵, although newer CBE and ABE variants with engineered deaminases greatly reduce Cas9-independent off-target DNA and RNA editing¹⁶³⁻¹⁶⁵. Prime editors lack base-modification enzymes such as deaminases, and therefore have no inherent ability to modify DNA or RNA bases in a Cas9-independent manner.

[1382] While the reverse transcriptase domain in prime editors in principle could process properly primed RNA or DNA templates in cells, it was noted that retrotransposons such as those in the LINE-1 family¹⁶⁶, endogenous retroviruses^{167,168}, and human telomerase all provided active endogenous human reverse transcriptases. Their natural presence in human cells suggests that reverse transcriptase activity itself is not substantially toxic. Indeed, no PE3-dependent differences were observed in HEK293T cell viability compared to that of controls expressing dCas9, Cas9 H840A nickase, or PE2 with R110S+K103L (PE2-dRT) mutations that inactivate the reverse transcriptase¹⁶⁹ (FIGS. 49A-49B).

[1383] The above data and analyses notwithstanding, additional studies are needed to assess off-target prime editing in an unbiased, genome-wide manner, as well as to characterize the extent to which the reverse transcriptase variants in prime editors, or prime editing intermediates, may affect cells.

### Prime Editing Pathogenic Transversion, Insertion, and Deletion Mutations in Human Cells

[1384] The ability of PE3 to directly install or correct in human cells transversion, small insertion, and small deletion mutations that cause genetic diseases, was tested. Sickle cell disease is most commonly caused by an A⋅T-to-T⋅A transversion mutation in HBB, resulting in the mutation of Glu6→Val in beta-globin. Treatment of hematopoietic stem cells ex vivo with Cas9 nuclease and a donor DNA template for HDR, followed by enrichment of edited cells, transplantation, and engraftment is a promising potential strategy for the treatment of sickle-cell disease¹⁷⁰. However, this approach still generates many indel-containing byproducts in addition to the correctly edited HBB allele¹⁷⁰⁻¹⁷¹. While base editors generally produce far fewer indels, they cannot currently make the T⋅A-to-A⋅T transversion mutation needed to directly restore the normal sequence of HBB.

[1385] PE3 was used to install the HBB E6V mutation in HEK293T cells with 44% efficiency and 4.8% indels (FIG. 43A. From the mixture of PE3-treated cells, we isolated six HEK293T cell lines that are homozygous (triploid) for the HBB E6V allele (FIGS. 53A-53E), demonstrating the ability of prime editing to generate human cell lines with pathogenic mutations. To correct the HBB E6V allele to wild-type HBB, we treated homozygous HBB E6V HEK293T cells with PE3 and a PEgRNA programmed to directly revert the HBB E6V mutation to wild-type HBB. In total, 14 PEgRNA designs were tested. After three days, DNA sequencing revealed that all 14 PEgRNAs when combined with PE3 gave efficient correction of HBB E6V to wild-type HBB (≥26% wild-type HBB without indels), and indel levels averaging 2.8±0.70% (FIG. 50A). The best PEgRNA resulted in 52% correction of HBB E6V to wild-type with 2.4% indels (FIG. 43A). Introduction of a silent mutation that modifies the PAM recognized by the PEgRNA modestly improved editing efficiency and product purity, to 58% correction with 1.4% indels (FIG. 43A). These results establish that prime editing can install and correct a pathogenic transversion point mutation in a human cell line with high efficiency and minimal byproducts.

[1386] Tay-Sachs disease is most often caused by a 4-bp insertion into the HEXA gene (HEXA 1278+TATC)¹³⁶. PE3 was used to install this 4-bp insertion into HEK293T cells with 31% efficiency and 0.8% indels (FIG. 43B), and isolated two HEK293T cell lines that are homozygous for the HEXA 1278+TATC allele (FIGS. 53A-53E). These cells were used to test 43 PEgRNAs and three nicking sgRNAs with PE3 or PE3b systems for correction of the pathogenic insertion in HEXA (FIG. 50B), either by perfect reversion to the wild-type allele or by a shifted 4-bp deletion that disrupts the PAM and installs a silent mutation. Nineteen of the 43 PEgRNAs tested resulted in ≥20% editing. Perfect correction to wild-type HEXA with PE3 or PE3b and the best PEgRNA proceeded with similar average efficiencies (30% for PE3 vs. 33% for PE3b), but the PE3b system was accompanied by 5.3-fold fewer indel products (1.7% for PE3 vs. 0.32% for PE3b) (FIG. 43B and FIG. 50B). These findings demonstrate the ability of prime editing to make precise small insertions and deletions that install or correct a pathogenic allele in mammalian cells efficiently and with a minimum of byproducts.

[1387] Finally, the installation of a protective SNP into PRNP, the gene encoding the human prion protein (PrP), was tested. PrP misfolding causes progressive and fatal neurodegenerative prion disease that can arise spontaneously, through inherited dominant mutations in the PRNP gene, or through exposure to misfolded PrP¹⁷². A naturally occurring PRNP G127V mutant allele confers resistance to prion disease in humans¹³⁸ and mice¹⁷³. PE3 was used to install G127V into the human PRNP allele in HEK293T cells, which requires a G⋅C-to-T⋅A transversion. Four PEgRNAs and three nicking sgRNAs were evaluated with the PE3 system. After three days of exposure to the most effective PE3 and PEgRNA, DNA sequencing revealed 53±11% efficiency of installing the G127V mutation and indel levels of 1.7±0.7% (FIG. 43C). Taken together, these results establish the ability of prime editing in human cells to install or correct transversion, insertion, or deletion mutations that cause or confer resistance to disease efficiently, and with a minimum of byproducts.

### Prime Editing in Various Human Cell Lines and Primary Mouse Neurons

[1388] Next, prime editing was tested for its ability to edit endogenous sites in three additional human cell lines. In K562 (leukemic bone marrow) cells, PE3 was used to perform transversion edits in the HEK3, EMX1, and FANCF sites, as well as the 18-bp insertion of a 6×His tag in HEK3. An average editing efficiency of 15-30% was observed for each of these four PE3-mediated edits, with indels averaging 0.85-2.2% (FIG. 43A). In U2OS (osteosarcoma) cells, transversion mutations in HEK3 and FANCF were installed, as well as a 3-bp insertion and 6×His tag insertion into HEK3, with 7.9-22% editing efficiency that exceeded indel formation 10- to 76 fold (FIG. 43A). Finally, in HeLa (cervical cancer) cells, a 3-bp insertion into HEK3 was performed, with 12% average efficiency and 1.3% indels (FIG. 43A). Collectively, these data indicate that multiple cell lines beyond HEK293T cells support prime editing, although editing efficiencies vary by cell type and are generally less efficient than in HEK293T cells. Editing:indel ratios remained high in all tested human cell lines.

[1389] To determine if prime editing is possible in post-mitotic, terminally differentiated primary cells, primary cortical neurons harvested from E18.5 mice were transduced with a dual split-PE3 lentiviral delivery system in which split-intein splicing²⁰³ reconstitutes PE2 protein from N-terminal and C-terminal halves, each delivered from a separate virus. To restrict editing to post-mitotic neurons, the human synapsin promoter, which is highly specific for mature neurons²⁰⁴, was used to drive expression of both PE2 protein components. GFP was fused through a self-cleaving P2A peptide²⁰⁵ to the N-terminal half of PE2. Nuclei from neurons were isolated two weeks following dual viral transduction and were sequenced directly, or sorted for GFP expression before sequencing. A 7.1±1.2% average prime editing to install a transversion at the DNMT1 locus with 0.58±0.14% average indels in sorted nuclei (FIG. 43D was observed. Cas9 nuclease in the same split-intein dual lentivirus system resulted in 31±5.5% indels among sorted cortical neuron nuclei (FIG. 43D. These data indicate that post-mitotic, terminally differentiated primary cells can support prime editing, and thus establish that prime editing does not require cell replication.

Prime Editing Compared with Cas9-Initiated HDR

[1390] The performance of PE3 was compared with that of optimized Cas9-initiated HDR^{128,125} in mitotic cell lines that support HDR¹²⁸. HEK293T, HeLa, K562 and U2OS cells were treated with Cas9 nuclease, a sgRNA, and an ssDNA donor oligonucleotide template designed to install a variety of transversion and insertion edits (FIGS. 43E-43G, and FIGS. 51A-51G). Cas9-initiated HDR in all cases successfully installed the desired edit, but with far higher levels of byproducts (predominantly indels), as expected from treatments that cause double-stranded breaks. Using PE3 in HEK293T cells, HBB E6V installation and correction proceeded with 42% and 58% average editing efficiency with 2.6% and 1.4% average indels, respectively (FIG. 43E and FIG. 43G). In contrast, the same edits with Cas9 nuclease and an HDR template resulted in 5.2% and 6.7% average editing efficiency, with 79% and 51% average indel frequency (FIG. 43E and FIG. 43G). Similarly, PE3 installed PRNP G127V with 53% efficiency and 1.7% indels, whereas Cas9-initiated HDR installed this mutation with 6.9% efficiency and 53% indels (FIG. 43E and FIG. 43G). Thus, the ratio of editing:indels for HBB E6V installation, HBB E6V correction, and PRNP G127V installation on average was 270-fold higher for PE3 than for Cas9-initiated HDR.

[1391] Comparisons between PE3 and HDR in human cell lines other than HEK293T showed similar results, although with lower PE3 editing efficiencies. For example, in K562 cells, PE3-mediated 3-bp insertion into HEK3 proceeded with 25% efficiency and 2.8% indels, compared with 17% editing and 72% indels for Cas9-initiated HDR, a 40-fold editing:indel ratio advantage favoring PE3 (FIGS. 43F-43G). In U2OS cells, PE3 performed this 3-bp insertion with 22% efficiency and 2.2% indels, while Cas9-initiated HDR resulted in 15% editing with 74% indels, a 49-fold lower editing:indel ratio (FIGS. 43F-43G). In HeLa cells, PE3 made this insertion with 12% efficiency and 1.3% indels, versus 3.0% editing and 69% indels for Cas9-initiated HDR, a 210-fold editing:indel ratio difference (FIGS. 43F-43G). Collectively, these data indicated that HDR typically results in similar or lower editing efficiencies and far higher indels than PE3 in the four cell lines tested (FIGS. 51A-51G).

### Discussion and Future Directions

[1392] The ability to insert DNA sequences with single-nucleotide precision is an especially enabling prime editing capability. For example, PE3 was used to precisely insert into the HEK3 locus in HEK293T cells a His6tag (18 bp, 65% average efficiency), a FLAG epitope tag (24 bp, 18% average efficiency), and an extended LoxP site (44 bp, 23% average efficiency) that is the native substrate for Cre recombinase. Average indels ranged between 3.0% and 5.9% for these examples (FIG. 43H). Many biotechnological, synthetic biology, and therapeutic applications are envisioned to arise from the ability to efficiently and precisely introduce new DNA sequences into target sites of interest in living cells.

[1393] Collectively, the prime editing experiments described herein installed 18 insertions up to 44 bp, 22 deletions up to 80 bp, 113 point mutations including 77 transversions, and 18 combination edits, across 12 endogenous loci in the human and mouse genomes at locations ranging from 3 bp upstream to 29 bp downstream of the start of a PAM without making explicit double-stranded DNA breaks. These results establish prime editing as a remarkably versatile genome editing method. Because the overwhelming majority (85-99%) of insertions, deletions, indels, and duplications in ClinVar are ≤30 bp (FIGS. 52A-52D), in principle prime editing can correct up to ˜89% of the 75,122 currently known pathogenic human genetic variants in ClinVar (transitions, transversions, insertions, deletions, indels, and duplications in FIG. 38A), with additional potential to ameliorate diseases caused by copy number gain or loss.

[1394] Importantly, for any desired edit the flexibility of prime editing offers many possible choices of PEgRNA-induced nick locations, sgRNA-induced second nick locations, PBS lengths, RT template lengths, and which strand to edit first, as demonstrated extensively herein. This flexibility, which contrasts with more limited options typically available for other precision genome editing methods^{125,142,154}, allows editing efficiency, product purity, DNA specificity, or other parameters to be optimized to suit the needs of a given application, as shown in FIGS. 50A-50B in which testing 14 and 43 PEgRNAs covering a range of prime editing strategies optimized correction of pathogenic HBB and HEXA alleles, respectively.

[1395] Much additional research is needed to further understand and improve prime editing. Additional modifications of prime editor systems may be required to expand their compatibility to include other cell types, such as post-mitotic cells. Interfacing prime editing with viral and non-viral in vitro and in vivo delivery strategies is needed to fully explore the potential of prime editing to enable a wide range of applications including the study and treatment of genetic diseases. By enabling highly precise targeted transitions, transversions, small insertions, and small deletions in the genomes of mammalian cells without requiring double-stranded breaks or HDR, however, prime editing provides a new “search-and-replace” capability that substantially expands the scope of genome editing.

### Methods

### General Methods

[1396] DNA amplification was conducted by PCR using Phusion U Green Multiplex PCR Master Mix (ThermoFisher Scientific) or Q5 Hot Start High-Fidelity 2× Master Mix (New England BioLabs) unless otherwise noted. DNA oligonucleotides, including Cy5-labeled DNA oligonucleotides, dCas9 protein, and Cas9 H840A protein were obtained from Integrated DNA Technologies. Yeast reporter plasmids were derived from previously described plasmids64 and cloned by the Gibson assembly method. All mammalian editor plasmids used herein were assembled using the USER cloning method as previously described¹⁷⁵. Plasmids expressing sgRNAs were constructed by ligation of annealed oligonucleotides into BsmBI-digested acceptor vector. Plasmids expressing PEgRNAs were constructed by Gibson assembly or Golden Gate assembly using a custom acceptor plasmid (see supplemental ‘Golden Gate assembly’ outline). Sequences of sgRNA and PEgRNA constructs used herein are listed in Tables 2A-2C and Tables 3A-3R. All vectors for mammalian cell experiments were purified using Plasmid Plus Midiprep kits (Qiagen) or PureYield plasmid miniprep kits (Promega), which include endotoxin removal steps. All experiments using live animals were approved by the Broad Institute Institutional and Animal Care and Use Committees. Wild-type C57BL/6 mice were obtained from Charles River (#027).

### In Vitro Biochemical Assays

[1397] PEgRNAs and sgRNAs were transcribed in vitro using the HiScribe T7 in vitro transcription kit (New England Biolabs) from PCR-amplified templates containing a T7 promoter sequence. RNA was purified by denaturing urea PAGE and quality-confirmed by an analytical gel prior to use. 5′-Cy5-labeled DNA duplex substrates were annealed using two oligonucleotides (Cy5-AVA024 and AVA025; 1:1.1 ratio) for the non-nicked substrate or three oligonucleotides (Cy5-AVA023, AVA025 and AVA026; 1:1.1:1.1) for the pre-nicked substrate by heating to 95° C. for 3 minutes followed by slowly cooling to room temperature (Tables 2A-2C). Cas9 cleavage and reverse transcription reactions were carried out in 1× cleavage buffer²⁰⁵ supplemented with dNTPs (20 mM HEPES-K, pH 7.5; 100 mM KCl; 5% glycerol; 0.2 mM EDTA, pH 8.0; 3 mM MgCl2; 0.5 mM dNTP mix; 5 mM DTT). dCas9 or Cas9 H840A (5 μM final) and the sgRNA or PEgRNA (5 μM final) were pre-incubated at room temperature in a 5 μL reaction mixture for 10 minutes prior to the addition of duplex DNA substrate (400 nM final), followed by the addition of Superscript III reverse transcriptase (ThermoFisher Scientific), an undisclosed M-MLV RT variant, when applicable. Reactions were carried out at 37° C. for 1 hour, then diluted to a volume of 10 μL with water, treated with 0.2 μL of proteinase K solution (20 mg/mL, ThermoFisher Scientific), and incubated at room temperature for 30 minutes. Following heat inactivation at 95° C. for 10 minutes, reaction products were combined with 2× formamide gel loading buffer (90% formamide; 10% glycerol; 0.01% bromophenol blue), denatured at 95° C. for 5 minutes, and separated by denaturing urea-PAGE gel (15% TBE-urea, 55° C., 200V). DNA products were visualized by Cy5 fluorescence signal using a Typhoon FLA 7000 biomolecular imager.

[1398] Electrophoretic mobility shift assays were carried out in 1× binding buffer (1× cleavage buffer+10 μg/mL heparin) using pre-incubated dCas9:sgRNA or dCas9:PEgRNA complexes (concentration range between 5 nM and 1 μM final) and Cy5-labeled duplex DNA (Cy5-AVA024 and AVA025; 20 nM final). After 15 minutes of incubation at 37° C., the samples were analyzed by native PAGE gel (10% TBE) and imaged for Cy5 fluorescence.

[1399] For DNA sequencing of reverse transcription products, fluorescent bands were excised and purified from urea-PAGE gels, then 3′ tailed with terminal transferase (TdT; New England Biolabs) in the presence of dGTP or dATP according to the manufacturer's protocol. Tailed DNA products were diluted 10-fold with binding buffer (40% saturated aqueous guanidinium chloride+60% isopropanol) and purified by QIAquick spin column (Qiagen), then used as templates for primer extension by Klenow fragment (New England Biolabs) using primer AVA134 (A-tailed products) or AVA135 (G-tailed products) (Tables 2A-2C). Extension were amplified by PCR for 10 cycles using primers AVA110 and AVA122, then sequenced with AVA037 using the Sanger method (Tables 2A-2C).

### Yeast Fluorescent Reporter Assays

[1400] Dual fluorescent reporter plasmids containing an in-frame stop codon, a +1 frameshift, or a −1 frameshift were subjected to 5′-extended PEgRNA or 3′-extended PEgRNA prime editing reactions in vitro as described above. Following incubation at 37° C. for 1 hour, the reactions were diluted with water and plasmid DNA was precipitated with 0.3 M sodium acetate and 70% ethanol. Resuspended DNA was transformed into S. cerevisiae by electroporation as previously described⁶⁷ and plated on synthetic complete media without leucine (SC(glucose), L-). GFP and mCherry fluorescence signals were visualized from colonies with the Typhoon FLA 7000 biomolecular imager.

### General Mammalian Cell Culture Conditions

[1401] HEK293T (ATCC CRL-3216), U20S (ATTC HTB-96), K562 (CCL-243), and HeLa (CCL-2) cells were purchased from ATCC and cultured and passaged in Dulbecco's Modified Eagle's Medium (DMEM) plus GlutaMAX (ThermoFisher Scientific), McCoy's 5A Medium (Gibco), RPMI Medium 1640 plus GlutaMAX (Gibco), or Eagle's Minimal Essential Medium (EMEM, ATCC), respectively, each supplemented with 10% (v/v) fetal bovine serum (Gibco, qualified) and 1× Penicillin Streptomycin (Corning). All cell types were incubated, maintained, and cultured at 37° C. with 5% CO2. Cell lines were authenticated by their respective suppliers and tested negative for mycoplasma.

### HEK293T Tissue Culture Transfection Protocol and Genomic DNA Preparation

[1402] HEK293T cells grown were seeded on 48-well poly-D-lysine coated plates (Corning). 16 to 24 hours post-seeding, cells were transfected at approximately 60% confluency with 1 μL of Lipofectamine 2000 (Thermo Fisher Scientific) according to the manufacturer's protocols and 750 ng of PE plasmid, 250 ng of PEgRNA plasmid, and 83 ng of sgRNA plasmid (for PE3 and PE3b). Unless otherwise stated, cells were cultured 3 days following transfection, after which the media was removed, the cells were washed with 1×PBS solution (Thermo Fisher Scientific), and genomic DNA was extracted by the addition of 150 μL of freshly prepared lysis buffer (10 mM Tris-HCl, pH 7.5; 0.05% SDS; 25 μg/mL Proteinase K (ThermoFisher Scientific)) directly into each well of the tissue culture plate. The genomic DNA mixture was incubated at 37° C. for 1 to 2 hours, followed by an 80° C. enzyme inactivation step for 30 minutes. Primers used for mammalian cell genomic DNA amplification are listed in Table 4. For HDR experiments in HEK293T cells, 231 ng of nuclease-expression plasmid, 69 ng of sgRNA expression plasmid, 50 ng (1.51 pmol) 100-nt ssDNA donor template (PAGE-purified; Integrated DNA Technologies) was lipofected using 1.4 μL Lipofectamine 2000 (ThermoFisher) per well. Genomic DNA from all HDR experiments was purified using the Agencourt DNAdvance Kit (Beckman Coulter), according to the manufacturer's protocol.

### High-Throughput DNA Sequencing of Genomic DNA Samples

[1403] Genomic sites of interest were amplified from genomic DNA samples and sequenced on an Illumina MiSeq as previously described with the following modifications^{129,130}. Briefly, amplification primers containing Illumina forward and reverse adapters (Table 4) were used for a first round of PCR (PCR 1) amplifying the genomic region of interest. 25 μL PCR 1 reactions were performed with 0.5 μM of each forward and reverse primer, 1 μL of genomic DNA extract and 12.5 μL of Phusion U Green Multiplex PCR Master Mix. PCR reactions were carried out as follows: 98° C. for 2 minutes, then 30 cycles of [98° C. for 10 seconds, 61° C. for 20 seconds, and 72° C. for 30 seconds], followed by a final 72° C. extension for 2 minutes. Unique Illumina barcoding primer pairs were added to each sample in a secondary PCR reaction (PCR 2). Specifically, 25 μL of a given PCR 2 reaction contained 0.5 μM of each unique forward and reverse illumina barcoding primer pair, 1 μL of unpurified PCR 1 reaction mixture, and 12.5 μL of Phusion U Green Multiplex PCR 2× Master Mix. The barcoding PCR 2 reactions were carried out as follows: 98° C. for 2 minutes, then 12 cycles of [98° C. for 10 seconds, 61° C. for 20 seconds, and 72° C. for 30 seconds], followed by a final 72° C. extension for 2 minutes. PCR products were evaluated analytically by electrophoresis in a 1.5% agarose gel. PCR 2 products (pooled by common amplicons) were purified by electrophoresis with a 1.5% agarose gel using a QIAquick Gel Extraction Kit (Qiagen), eluting with 40 μL of water. DNA concentration was measured by fluorometric quantification (Qubit, ThermoFisher Scientific) or qPCR (KAPA Library Quantification Kit-Illumina, KAPA Biosystems) and sequenced on an Illumina MiSeq instrument according to the manufacturer's protocols.

[1404] Sequencing reads were demultiplexed using MiSeq Reporter (Illumina). Alignment of amplicon sequences to a reference sequence was performed using CRISPResso2¹⁷⁸. For quantification of point mutation editing, CRISPResso2 was run in standard mode with “discard_indel_reads” on. Editing efficiency was calculated as: (frequency of specified point mutation in non-discarded reads)×(# of non-discarded reads)÷total reads. For insertion or deletion edits, CRISPResso2 was run in HDR mode using the desired allele as the expected allele (e flag), and with “discard_indel_reads” ON. Editing yield was calculated as the number of HDR aligned reads divided by total reads. For all edits, indel yields were calculated as the number of discarded reads divided by total reads.

### Nucleofection of U2OS, K562, and HeLa Cells

[1405] Nucleofection was performed in all experiments using K562, HeLa, and U20S cells. For PE conditions in these cell types, 800 ng prime editor-expression plasmid, 200 ng PEgRNA-expression plasmid, and 83 ng nicking plasmid was nucleofected in a final volume of 20 μL in a 16-well nucleocuvette strip (Lonza). For HDR conditions in these three cell types, 350 ng nuclease-expression plasmid, 150 ng sgRNA-expression plasmid and 200 pmol (6.6 μg) 100-nt ssDNA donor template (PAGE-purified; Integrated DNA Technologies) was nucleofected in a final volume of 20 μL per sample in a 16-well Nucleocuvette strip (Lonza). K562 cells were nucleofected using the SF Cell Line 4D-Nucleofector X Kit (Lonza) with 5×10⁵ cells per sample (program FF-120), according to the manufacturers protocol. U20S cells were nucleofected using the SE Cell Line 4D-Nucleofector X Kit (Lonza) with 3-4×10⁵ cells per sample (program DN-100), according to the manufacturers protocol. HeLa cells were nucleofected using the SE Cell Line 4D-Nucleofector X Kit (Lonza) with 2×10⁵ cells per sample (program CN-114), according to the manufacturers protocol. Cells were harvested 72 hours after nucleofection for genomic DNA extraction.

### Genomic DNA Extraction for HDR Experiments

[1406] Genomic DNA from all HDR comparison experiments in HEK293T, HEK293T HBB E6V, K562, U20S, and HeLa cells was purified using the Agencourt DNAdvance Kit (Beckman Coulter), according to the manufacturer's protocol.

### Comparison Between PE2, PE3, BE2, BE4max, ABEdmax, and ABEmax

[1407] HEK293T cells were seeded on 48-well poly-D-lysine coated plates (Corning). After 16 to 24 hours, cells were transfected at approximately 60% confluency. For base editing with CBE or ABE constructs, cells were transfected with 750 ng of base editor plasmid, 250 ng of sgRNA expression plasmid, and 1 μL of Lipofectamine 2000 (Thermo Fisher Scientific). PE transfections were performed as described above. Genomic DNA extraction for PE and BE was performed as described above.

### Determination of PE3 Activity at Known Cas9 Off-Target Sites

[1408] To evaluate PE3 off-target editing activity at known Cas9 off-target sites, genomic DNA extracted from HEK293T cells 3 days after transfection with PE3 was used as template for PCR amplification of 16 previously reported Cas9 off-target genomic sites^{118,159} (the top four off-target sites each for the HEK3, EMX1, FANCF, and HEK4 spacers; primer sequences are listed in Table 4). These genomic DNA samples were identical to those used for quantifying on-target PE3 editing activities shown in FIGS. 41A-41K; PEgRNA and nicking sgRNA sequences are listed in Tables 3A-3R. Following PCR amplification of off-target sites, amplicons were sequenced on the Illumina MiSeq platform as described above (HTS analysis). For determining Cas9 nuclease, Cas9 H840A nickase, dCas9, and PE2-dRT on-target and off-target editing activity, HEK293T cells were transfected with 750 ng of editor plasmid (Cas9 nuclease, Cas9 H840A nickase, dCas9, or PE2-dRT), 250 ng of PEgRNA or sgRNA plasmid, and 1 μL of Lipofectamine 2000. Genomic DNA was isolated from cells 3 days after transfection as described above. On-target and off-target genomic loci were amplified by PCR using primer sequences in Table 4 and sequenced on an Illumina MiSeq.

[1409] HTS data analysis was performed using CRISPResso2¹⁷⁸. The editing efficiencies of Cas9 nuclease, Cas9 H840A nickase, and dCas9 were quantified as the percent of total sequencing reads containing indels. For quantification of PE3 and PE3-dRT off-targets, aligned sequencing reads were examined for point mutations, insertions, or deletions that were consistent with the anticipated product of PEgRNA reverse transcription initiated at the Cas9 nick site. Single nucleotide variations occurring at <0.1% overall frequency among total reads within a sample were excluded from analysis. For reads containing single nucleotide variations that both occurred at frequencies ≥0.1% and were partially consistent with the PEgRNA-encoded edit, t-tests (unpaired, one-tailed, α=0.5) were used to determine if the variants occurred at significantly higher levels compared to samples treated with PEgRNAs that contained the same spacer but encoded different edits. To avoid differences in sequencing errors, comparisons were made between samples that were sequenced simultaneously within the same MiSeq run. Variants that did not meet the criteria of p-value >0.05 were excluded. Off-target PE3 editing activity was then calculated as the percentage of total sequencing reads that met the above criteria.

### Generation of a HEK293T Cell Line Containing the HBB E6V Mutation Using Cas9-Initiated HDR

[1410] HEK293T cells were seeded in a 48-well plate and transfected at approximately 60% confluency with 1.5 μL of Lipofectamine 2000, 300 ng of Cas9 D10A nickase plasmid, 100 ng of sgRNA plasmid, and 200 ng of 100-mer ssDNA donor template (Table 5). Three days after transfection, media was exchanged for fresh media. Four days after transfection, cells were dissociated using 30 μL of TrypLE solution and suspended in 1.5 mL of media. Single cells were isolated into individual wells of two 96-well plates by fluorescence-activated cell sorting (FACS) (Beckman-Coulter Astrios). See FIGS. 53A-53B for representative FACS sorting examples. Cells were expanded for 14 days prior to genomic DNA sequencing as described above. Of the isolated clonal populations, none was found to be homozygous for the HBB E6V mutation, so a second round of editing by lipofection, sorting, and outgrowth was repeated in a partially edited cell line to yield a cell line homozygous for the E6V allele.

### Generation of a HEK293T Cell Line Containing the HBB E6V Mutation Using PE3

[1411] 2.5×104 HEK293T cells grown in the absence of antibiotic were seeded on 48-well poly-D-lysine coated plates (Corning). 16 to 24 hours post-seeding, cells were transfected at approximately 70% confluency with 1 μL of Lipofectamine 2000 (Thermo Fisher Scientific) according to the manufacturer's protocols and 750 ng of PE2-P2A-GFP plasmid, 250 ng of PEgRNA plasmid, and 83 ng of sgRNA plasmid. After 3 days post transfection, cells were washed with phosphate-buffered saline (Gibco) and dissociated using TrypLE Express (Gibco). Cells were then diluted with DMEM plus GlutaMax (Thermo Fisher Scientific) supplemented with 10% (v/v) FBS (Gibco) and passed through a 35-pm cell strainer (Corning) prior to sorting. Flow cytometry was carried out on a LE-MA900 cell sorter (Sony). Cells were treated with 3 nM DAPI (BioLegend) 15 minutes prior to sorting. After gating for doublet exclusion, single DAPI-negative cells with GFP fluorescence above that of a GFP-negative control cell population were sorted into 96-well flat-bottom cell culture plates (Corning) filled with pre-chilled DMEM with GlutaMax supplemented with 10% FBS. See FIGS. 53A-53B for representative FACS sorting examples. Cells were cultured for 10 days prior to genomic DNA extraction and characterization by HTS, as described above. A total of six clonal cell lines were identified that are homozygous for the E6V mutation in HBB.

### Generation of a HEK293T Cell Line Containing the HEXA 1278+TATC Insertion Using PE3

[1412] HEK293T cells containing the HEXA 1278+TATC allele were generated following the protocol described above for creation of the HBB E6V cell line; PEgRNA and sgRNA sequences are listed in Tables 2A-2C under the FIGS. 43A-43H subheading. After transfection and sorting, cells were cultured for 10 days prior to genomic DNA extraction and characterization by HTS, as described above. Two heterozygous cell lines were isolated that contained 50% HEXA 1278+TATC alleles, and two homozygous cell lines containing 100% HEXA 1278+TATC alleles were recovered.

### Cell Viability Assays

[1413] HEK293T cells were seeded in 48-well plates and transfected at approximately 70% confluency with 750 ng of editor plasmid (PE3, PE3 R110S K103L, Cas9 H840A nickase, or dCas9), 250 ng of HEK3-targeting PEgRNA plasmid, and 1 μL of Lipofectamine 2000, as described above. Cell viability was measured every 24 hours post-transfection for 3 days using the CellTiter-Glo 2.0 assay (Promega) according to the manufacturer's protocol. Luminescence was measured in 96-well flat-bottomed polystyrene microplates (Corning) using a M1000 Pro microplate reader (Tecan) with a 1-second integration time.

### Lentivirus Production

[1414] Lentivirus was produced as previously described²⁰⁶. T-75 flasks of rapidly dividing HEK293T cells (ATCC; Manassas, Va., USA) were transfected with lentivirus production helper plasmids pVSV-G and psPAX2 in combination with modified lentiCRISPR_v2 genomes carrying intein-split PE2 editor using FuGENE HD (Promega, Madison, Wis., USA) according to the manufacturer's directions. Four split-intein editor constructs were designed: 1) a viral genome encoding a U6-PEgRNA expression cassette and the N-terminal portion (1-573) of Cas9 H840A nickase fused to the Npu N-intein, a self-cleaving P2A peptide, and GFP-KASH; 2) a viral genome encoding the Npu C-intein fused to the C-terminal remainder of PE2; 3) a viral genome encoding the Npu C-intein fused to the C-terminal remainder of Cas9 for the Cas9 control; and 4) a nicking sgRNA for DNMT1. The split-intein mediates trans splicing to join the two halves of PE2 or Cas9, while the P2A GFP-KASH enables co-translational production of a nuclear membrane-localized GFP. After 48 hours, supernatant was collected, centrifuged at 500 g for 5 minutes to remove cellular debris, and filtered using a 0.45 μm filter. Filtered supernatant was concentrated using the PEG-it Virus Precipitation Solution (System Biosciences, Palo Alto, Calif., USA) according to the manufacturer's directions. The resulting pellet was resuspended in Opti-MEM (Thermo Fisher Scientific, Waltham, Mass., USA) using 1% of the original media volume. Resuspended pellet was flash-frozen and stored at −80° C. until use.

### Mouse Primary Cortical Neuron Dissection and Culture

[1415] E18.5 dissociated cortical cultures were harvested from timed-pregnant C57BL/6 mice (Charles River). Embryos were harvested from pregnant mice after euthanasia by CO2 followed by decapitation. Cortical caps were dissected in ice-cold Hibernate-E supplemented with penicillin/streptomycin (Life Technologies). Following a rinse with ice-cold Hibernate-E, tissue was digested at 37° C. for 8 minutes in papain/DNase (Worthington/Sigma). Tissue was triturated in NBActiv4 (BrainBits) supplemented with DNase. Cells were counted and plated in 24-well plates at 100,000 cells per well. Half of the media was changed twice per week.

### Prime Editing in Primary Neurons and Nuclei Isolation

[1416] At DIV 1, 15 μL of lentivirus was added at 10:10:1 ratio of N-terminal:C-terminal:nicking sgRNA. At DIV 14, neuronal nuclei were isolated using the EZ-PREP buffer (Sigma D8938) following the manufacturer's protocol. All steps were performed on ice or at 4° C. Media was removed from dissociated cultures, and cultures were washed with ice-cold PBS. PBS was aspirated and replaced with 200 μL EZ-PREP solution. Following a 5-minute incubation on ice, EZ-PREP was pipetted across the surface of the well to dislodge remaining cells. The sample was centrifuged at 500 g for 5 minutes, and the supernatant removed. Samples were washed with 200 μL EZ-PREP and centrifuged again at 500 g for 5 minutes. Samples were resuspended with gentle pipetting in 200 μL ice-cold Nuclei Suspension Buffer (NSB) consisting of 100 μg/mL BSA and 3.33 μM Vybrant DyeCycle Ruby (Thermo Fisher) in 1×PBS, then centrifuged at 500 g for 5 minutes. The supernatant was removed and nuclei were resuspended in 100 μL NSB and sorted into 100 μL Agencourt DNAdvance lysis buffer using a MoFlo Astrios (Beckman Coulter) at the Broad Institute flow cytometry facility. Genomic DNA was purified according to the manufacturer's Agencourt DNAdvance instructions.

### RNA-Sequencing and Data Analysis

[1417] HEK293T cells were co-transfected with PRNP-targeting or HEXA-targeting PEgRNAs and PE2, PE2-dRT, or Cas9 H840A nickase. 72 hours following transfection, total RNA was harvested from cells using TRIzol reagent (Thermo Fisher) and purified with RNeasy Mini kit (Qiagen) including on-column DNaseI treatment. Ribosomes were depleted from total RNA using the rRNA removal protocol of the TruSeq Stranded Total RNA library prep kit (Illumina) and subsequently washed with RNAClean XP beads (Beckman Coulter). Sequencing libraries were prepared using ribo-depleted RNA on a SMARTer PrepX Apollo NGS library prep system (Takara) following the manufacturer's protocol. Resulting libraries were visualized on a 2200 TapeStation (Agilent Technologies), normalized using a Qubit dsDNA HS assay (Thermo Fisher), and sequenced on a NextSeq 550 using high output v2 flow cell (Illumina) as 75-bp paired-end reads. Fastq files were generated with bcl2fastq2 version 2.20 and trimmed using TrimGalore version 0.6.2 (github.com/FelixKrueger/TrimGalore) to remove low-quality bases, unpaired sequences, and adaptor sequences. Trimmed reads were aligned to a Homo sapiens genome assembly GRCh¹⁴⁸ with a custom Cas9 H840A gene entry using RSEM version 1.3.1²⁰⁷. The limma-voom²⁰⁸ package was used to normalize gene expression levels and perform differential expression analysis with batch effect correction. Differentially expressed genes were called with FDR-corrected p-value <0.05 and fold-change >2 cutoffs, and results were visualized in R.

### ClinVar Analysis

[1418] The ClinVar variant summary was downloaded from NCBI (accessed Jul. 15, 2019), and the information contained therein was used for all downstream analysis. The list of all reported variants was filtered by allele ID in order to remove duplicates and by clinical significance in order to restrict the analysis to pathogenic variants. The list of pathogenic variants was filtered sequentially by variant type in order to calculate the fraction of pathogenic variants that are insertions, deletions, etc. Single nucleotide variants (SNVs) were separated into two categories (transitions and transversions) based on the reported reference and alternate alleles. SNVs that did not report reference or alternate alleles were excluded from the analysis.

[1419] The lengths of reported insertions, deletions, and duplications were calculated using reference/alternate alleles, variant start/stop positions, or appropriate identifying information in the variant name. Variants that did not report any of the above information were excluded from the analysis. The lengths of reported indels (single variants that include both insertions and deletions relative to the reference genome) were calculated by determining the number of mismatches or gaps in the best pairwise alignment between the reference and alternate alleles. Frequency distributions of variant lengths were calculated using GraphPad Prism 8.

### Data Availability

[1420] High-throughput sequencing data are deposited to the NCBI Sequence Read Archive database. Plasmids encoding PE1, PE2/PE3, and PEgRNA expression vectors will be available from Addgene.

### Code Availability

[1421] The script used to quantify PEgRNA scaffold insertion is provided in FIGS. 60A-60B.

### Supplemental Information: Tables and Sequences

TABLE 1
Activities of prime editors, Cas9 nuclease, Cas9 H840A nickase, and PE2-
dRT at HEK3, HEK4, EMX1, and FANCF on-target and off-target sites. PE2/PE3 editing is
shown as % prime editing alongside % indels (in parentheses). % indels are shown for Cas9,
Cas9 H840A nickase (nCas9), and PE2-dRT at the top four previously characterized off-
target sites^{179,180}. sgRNA and PEgRNA sequences can be found in Tables 3A-3R, under the
FIGs. 42A-42H heading. All values are the average of three independent biological
replicates.

| | PE pegRNA | | | | | | | | | | | | | | | | | | | |
|---|---|---|---|---|---|---|---|---|---|---|---|---|---|---|---|---|---|---|---|---|
| | HEK3 (PE3) | | | | | HEK4 (PE2) | | | | | EMX1 (PE3) | | | | | FANCF (PE3) | | | | |
| Site | . . . | 1 | 2 | 3 | 4 | . . . | 1 | 2 | 3 | 4 | . . . | 1 | 2 | 3 | 4 | . . . | 1 | 2 | 3 | 4 |
| On-target | | 44.2 | 61.2 | 40.4 | 48.4 | | 18.2 | 14.8 | 9.8 | 7.9 | | 28.6 | 14.1 | 35.7 | 15.4 | | 56.8 | 32.4 | 42.8 | 47.6 |
| | | (11.9) | (8.8) | (16.5) | (3.3) | | (0.9) | (1.8) | (2.0) | (2.2) | | (3.5) | (2.4) | (3.3) | (2.9) | | (9.3) | (16.7) | (13.6) | (12.9) |
| Off-target 1 | | <0.1 | <0.1 | <0.1 | <0.1 | | <0.1 | 0.4 | <0.1 | 0.4 | | <0.1 | <0.1 | <0.1 | <0.1 | | <0.1 | 0.6 | <0.1 | <0.1 |
| | | (<0.1) | (<0.1) | (<0.1) | (<0.1) | | (<0.1) | (<0.1) | (<0.1) | (<0.1) | | (0.1) | (0.1) | (0.1) | (0.1) | | (0.1) | (0.1) | (0.1) | (0.1) |
| Off-target 2 | | <0.1 | <0.1 | <0.1 | <0.1 | | <0.1 | <0.1 | <0.1 | <0.1 | | <0.1 | <0.1 | <0.1 | <0.1 | | <0.1 | <0.1 | <0.1 | <0.1 |
| | | (<0.1) | (<0.1) | (<0.1) | (<0.1) | | (0.1) | (0.1) | (0.1) | (0.1) | | (<0.1) | (0.1) | (0.1) | (0.1) | | (<0.1) | (<0.1) | (0.1) | (<0.1) |
| Off-target 3 | | <0.1 | <0.1 | <0.1 | <0.1 | | 0.2 | 6.8 | 19.2 | 7.0 | | <0.1 | <0.1 | <0.1 | <0.1 | | <0.1 | <0.1 | <0.1 | <0.1 |
| | | (<0.1) | (<0.1) | (<0.1) | (<0.1) | | (0.5) | (1.9) | (0.5) | (3.5) | | (0.3) | (0.3) | (0.3) | (0.3) | | (<0.1) | (<0.1) | (<0.1) | (<0.1) |
| Off-target 4 | | <0.1 | <0.1 | <0.1 | <0.1 | | <0.1 | <0.1 | <0.1 | <0.1 | | <0.1 | <0.1 | <0.1 | <0.1 | | <0.1 | <0.1 | <0.1 | <0.1 |
| | | (<0.1) | (<0.1) | (<0.1) | (<0.1) | | (<0.1) | (<0.1) | (0.2) | (<0.1) | | (0.1) | (0.1) | (0.2) | (0.1) | | (<0.1) | (<0.1) | (<0.1) | (<0.1) |
| | Cas9 pegRNA | | | | | | | | | | | | | | | | | | | |
| | HEK3 | | | | | HEK4 | | | | | EMX1 | | | | | FANCF | | | | |
| | sgRNA | 1 | 2 | 3 | 4 | sgRNA | 1 | 2 | 3 | 4 | sgRNA | 1 | 2 | 3 | 4 | sgRNA | 1 | 2 | 3 | 4 |
| On-target | 91.8 | 87.5 | 89.2 | 89.1 | 86.8 | 71.8 | 68.6 | 72.8 | 72.8 | 70.9 | 85.6 | 79.7 | 70.6 | 76.6 | 76.0 | 78.7 | 55.9 | 58.3 | 51.8 | 52.0 |
| Off-target 1 | 17.2 | 1.9 | 5.5 | 5.2 | 1.8 | 54.2 | 39.5 | 48.4 | 49.7 | 49.2 | 81.1 | 63.5 | 48.1 | 53.0 | 59.6 | 12.6 | 1.9 | 1.9 | 1.7 | 1.7 |
| Off-target 2 | 38.0 | 6.5 | 12.6 | 11.8 | 4.7 | 42.5 | 19.5 | 29.4 | 27.3 | 30.3 | 58.3 | 12.0 | 6.0 | 8.2 | 12.9 | 1.1 | 0.2 | 0.2 | 0.2 | 0.1 |
| Off-target 3 | 8.8 | 0.6 | 1.7 | 1.5 | 0.5 | 98.1 | 96.9 | 97.3 | 97.6 | 97.5 | 14.8 | 4.2 | 3.1 | 3.6 | 4.8 | 2.4 | 0.2 | <0.1 | 0.2 | 0.2 |
| Off-target 4 | 0.3 | <0.1 | <0.1 | 0.1 | <0.1 | 45.3 | 16.9 | 28.0 | 27.5 | 29.7 | 39.5 | 1.3 | 0.9 | 0.6 | 1.3 | 1.0 | 0.2 | 0.2 | 0.2 | 0.2 |
| | nCas9 pegRNA | | | | | | | | | | | | | | | | | | | |
| | HEK3 | | | | | HEK4 | | | | | EMX1 | | | | | FANCF | | | | |
| Site | . . . | 1 | 2 | 3 | 4 | . . . | 1 | 2 | 3 | 4 | . . . | 1 | 2 | 3 | 4 | . . . | 1 | 2 | 3 | 4 |
| Off-target 1 | | <0.1 | <0.1 | <0.1 | <0.1 | | <0.1 | <0.1 | <0.1 | <0.1 | | 0.1 | 0.1 | <0.1 | 0.1 | | <0.1 | <0.1 | <0.1 | <0.1 |
| Off-target 2 | | <0.1 | <0.1 | <0.1 | <0.1 | | <0.1 | <0.1 | <0.1 | <0.1 | | 0.3 | 0.1 | <0.1 | <0.1 | | <0.1 | <0.1 | <0.1 | <0.1 |
| Off-target 3 | | <0.1 | <0.1 | <0.1 | <0.1 | | 0.3 | 0.5 | 0.7 | 0.7 | | <0.1 | <0.1 | <0.1 | <0.1 | | <0.1 | <0.1 | <0.1 | <0.1 |
| Off-target 4 | | <0.1 | <0.1 | <0.1 | <0.1 | | <0.1 | 0.1 | <0.1 | <0.1 | | 1.5 | 0.1 | 0.1 | 0.4 | | <0.1 | <0.1 | <0.1 | <0.1 |
| | PE2-dRT pegRNA | | | | | | | | | | | | | | | | | | | |
| | HEK3 | | | | | HEK4 | | | | | EMX1 | | | | | FANCF | | | | |
| Site | . . . | 1 | 2 | 3 | 4 | . . . | 1 | 2 | 3 | 4 | . . . | 1 | 2 | 3 | 4 | . . . | 1 | 2 | 3 | 4 |
| Off-target 1 | | <0.1 | <0.1 | <0.1 | <0.1 | | 0.1 | 0.2 | <0.1 | <0.1 | | 0.1 | 0.1 | 0.1 | 0.1 | | <0.1 | <0.1 | <0.1 | <0.1 |
| Off-target 2 | | <0.1 | <0.1 | <0.1 | <0.1 | | <0.1 | 0.1 | <0.1 | <0.1 | | <0.1 | 0.3 | <0.1 | <0.1 | | <0.1 | <0.1 | <0.1 | <0.1 |
| Off-target 3 | | <0.1 | <0.1 | <0.1 | <0.1 | | <0.1 | 0.1 | 1.4 | 0.9 | | <0.1 | <0.1 | <0.1 | <0.1 | | <0.1 | <0.1 | <0.1 | <0.1 |
| Off-target 4 | | <0.1 | <0.1 | <0.1 | <0.1 | | 0.1 | 0.1 | 0.1 | 0.2 | | 0.9 | 0.1 | 0.1 | 0.2 | | <0.1 | <0.1 | <0.1 | <0.1 |

[1423] Tables 2A-2C: Sequences of DNA oligonucleotides, PEgRNAs, and sgRNAs used for in vitro experiments.

TABLE 2A
DNA oligonucleotides

| OLIGONUCLEOTIDE | SEQUENCE |
|---|---|
| AVA023 | 5CY5-CCTGGGTCAATCCTTGGGGCCCAGACTGAGCACG (SEQ ID |
| | NO: 374) |
| AVA024 | 5CY5- |
| | CCTGGGTCAATCCTTGGGGCCCAGACTGAGCACGTGATGGCAGAGG |
| | AAAGG (SEQ ID NO: 375) |
| AVA025 | 5PHOS- |
| | CCTTTCCTCTGCCATCACGTGCTCAGTCTGGGCCCCAAGGATTGACC |
| | CAGG (SEQ ID NO: 376) |
| AVA026 | 5PHOS-TGATGGCAGAGGAAAGG (SEQ ID NO: 377) |
| AVA037 | GCAGGCTTTAAAGGAACCAATTC (SEQ ID NO: 378) |
| AVA110 | GCAGGCTTTAAAGGAACCAATTCCCTGGGTCAATCCTTGGGGC (SEQ |
| | ID NO: 379) |
| AVA122 | CTCTGGAGGATCTAGCGGAG (SEQ ID NO: 380) |
| AVA134 | CTCTGGAGGATCTAGCGGAGTTTTTTTTTTTTTTTTTTTT (SEQ ID NO: |
| | 381) |
| AVA135 | CTCTGGAGGATCTAGCGGAGCCCCCCCCCCCCCC (SEQ ID NO: 382) |

TABLE 2B
5′-extended PEgRNAs

| | | | | | RT |
|---|---|---|---|---|---|
| | | | LINKER | PBS | TEMPLATE |
| | SPACER | 5′ EXTENSION | LENGTH | LENGTH | LENGTH |
| PEGRNA | SEQUENCE | SEQUENCE | (NT) | (NT) | (NT) |
| PEGRNA 1 | GGCCCAGACTG | GGCTAACCGTGCCATT | 15 | 5 | 7 |
| | AGCACGTGA | TGATCAGGTCA (SEQ | | | |
| | (SEQ ID NO: 383) | ID NO: 429) | | | |
| PEGRNA 2 | GGCCCAGACTG | GGCTAACCGTGCAAA | 15 | 5 | 7 |
| | AGCACGTGA | TTAACAAACTAA (SEQ | | | |
| | (SEQ ID NO: 384) | ID NO: 430) | | | |
| PEGRNA 3 | GGCCCAGACTG | GGCCATCTCGTGCAA | 15 | 5 | 8 |
| | AGCACGTGA | ATTAACAAACTAA | | | |
| | (SEQ ID NO: 385) | (SEQ ID NO: 431) | | | |
| PEGRNA 4 | GGCCCAGACTG | GGTCCTCTGCCATCTC | 15 | 5 | 15 |
| | AGCACGTGA | GTGCAAATTAACAAA | | | |
| | (SEQ ID NO: 386) | CTAA (SEQ ID NO: 432) | | | |
| PEGRNA 5 | GGCCCAGACTG | GGCTTCCTTTCCTCTG | 15 | 5 | 22 |
| | AGCACGTGA | CCATCTCGTGCAAATT | | | |
| | (SEQ ID NO: 387) | AACAAACTAA (SEQ ID | | | |
| | | NO: 433) | | | |
| 5′- | GGCCCAGACTG | GGCTAACCGTGCCATT | 15 | 5 | 7 |
| PEGRNA_RT_7_A | AGCACGTGA | TGATCAGGTCA (SEQ | | | |
| | (SEQ ID NO: 388) | ID NO: 434) | | | |
| 5′- | GGCCCAGACTG | GGCTAACCGTGCAAA | 15 | 5 | 7 |
| PEGRNA_RT_7_B | AGCACGTGA | TTAACAAACTAA (SEQ | | | |
| | (SEQ ID NO: 389) | ID NO: 435) | | | |
| 5′- | GGCCCAGACTG | GGCCATCTCGTGCAA | 15 | 5 | 8 |
| PEGRNA_RT_8 | AGCACGTGA | ATTAACAAACTAA | | | |
| | (SEQ ID NO: 390) | (SEQ ID NO: 436) | | | |
| 5′- | GGCCCAGACTG | GGTCCTCTGCCATCTC | 15 | 5 | 15 |
| PEGRNA_RT_15 | AGCACGTGA | GTGCAAATTAACAAA | | | |
| | (SEQ ID NO: 391) | CTAA (SEQ ID NO: 437) | | | |
| 5′- | GGCCCAGACTG | GGCTTCCTTTCCTCTG | 15 | 5 | 22 |
| PEGRNA_RT_22 | AGCACGTGA | CCATCTCGTGCAAATT | | | |
| | (SEQ ID NO: 392) | AACAAACTAA (SEQ ID | | | |
| | | NO: 438) | | | |

TABLE 2C
3′-extended PEgRNAs

| | | | | RT |
|---|---|---|---|---|
| | | | PBS | TEMPLATE |
| | | 3′ EXTENSION | LENGTH | LENGTH |
| PEGRNA | SPACER SEQUENCE | SEQUENCE | (NT) | (NT) |
| 3′-PEGRNA_10 | GGCCCAGACTGAG | TCTGCCATCTCG | 7 | 10 |
| | CACGTGA(SEQ ID | TGCTC (SEQ ID | | |
| | NO: 506) | NO: 439) | | |
| 3′- | GGCCCAGACTGAG | TCTGCCATCTCG | 7 | 10 |
| PEGRNA_YEAST_TTOA | CACGTGA (SEQ ID | TGCTC (SEQ ID | | |
| | NO: 507) | NO: 440) | | |
| 3′- | GGCCCAGACTGAG | TCTGCCATCATC | 7 | 11 |
| PEGRNA_YEAST_+1AINS | CACGTGA (SEQ ID | GTGCTC (SEQ ID | | |
| | NO: 508) | NO: 441) | | |
| 3′- | GGCCCAGACTGAG | TCTGCCATCCGT | 7 | 9 |
| PEGRNA_YEAST_+1TDEL | CACGTGA (SEQ ID | GCTC (SEQ ID | | |
| | NO: 509) | NO: 442) | | |

[1424] Tables 3A-3R: Sequences of PEgRNAs and sgRNAs used in mammalian cell experiments. All sequences are show in 5′ to 3′ orientation. To construct PEgRNAs, spacer sequences listed below were added to the 5′ end of the sgRNA scaffold and the 3′ extensions listed below containing the primer binding site and RT template were added to the 3′ end of the sgRNA scaffold. The sgRNA scaffold sequence is

(SEQ ID NO: 131)
GTTTTAGAGCTAGAAATAGCAAGTTAAAATAAGGCTAGTCCGTTATCAACT
TGAAAAAGTGGCACCGAGTCGGTGC.

TABLE 3A
FIGs. 39A-39D PEgRNA

| | | | | RT |
|---|---|---|---|---|
| | SPACER SEQUENCE | | PBS | TEMPLATE |
| | (SEQ ID NOS: | 3′ EXTENSION (SEQ ID | LENGTH | LENGTH |
| PEGRNA | 2890-2996) | NOS: 2997-3103) | (NT) | (NT) |
| HEK3_2B- | GGCCCAGACTGAG | TCTGCCATCTCGTGCTCA | 8 | 10 |
| C_8 | CACGTGA | | | |
| HEK3_2B- | GGCCCAGACTGAG | TCTGCCATCTCGTGCTCA | 9 | 10 |
| C_9 | CACGTGA | G | | |
| HEK3_2B- | GGCCCAGACTGAG | TCTGCCATCTCGTGCTCA | 10 | 10 |
| C_10 | CACGTGA | GT | | |
| HEK3_2B- | GGCCCAGACTGAG | TCTGCCATCTCGTGCTCA | 11 | 10 |
| C_11 | CACGTGA | GTC | | |
| HEK3_2B- | GGCCCAGACTGAG | TCTGCCATCTCGTGCTCA | 12 | 10 |
| C_12 | CACGTGA | GTCT | | |
| HEK3_2B- | GGCCCAGACTGAG | TCTGCCATCTCGTGCTCA | 13 | 10 |
| C_13 | CACGTGA | GTCTG | | |
| HEK3_2B- | GGCCCAGACTGAG | TCTGCCATCTCGTGCTCA | 14 | 10 |
| C_14 | CACGTGA | GTCTGG | | |
| HEK3_2B- | GGCCCAGACTGAG | TCTGCCATCTCGTGCTCA | 15 | 10 |
| C_15 | CACGTGA | GTCTGGG | | |
| HEK3_2C_16 | GGCCCAGACTGAG | TCTGCCATCTCGTGCTCA | 16 | 10 |
| | CACGTGA | GTCTGGGC | | |
| HEK3_2C_17 | GGCCCAGACTGAG | TCTGCCATCTCGTGCTCA | 17 | 10 |
| | CACGTGA | GTCTGGGCC | | |
| EMX1_2C_9 | GAGTCCGAGCAGA | ATGGGAGCACTTCTTCTT | 9 | 13 |
| | AGAAGAA | CTGC | | |
| EMX1_2C_10 | GAGTCCGAGCAGA | ATGGGAGCACTTCTTCTT | 10 | 13 |
| | AGAAGAA | CTGCT | | |
| EMX1_2C_11 | GAGTCCGAGCAGA | ATGGGAGCACTTCTTCTT | 11 | 13 |
| | AGAAGAA | CTGCTC | | |
| EMX1_2C_12 | GAGTCCGAGCAGA | ATGGGAGCACTTCTTCTT | 12 | 13 |
| | AGAAGAA | CTGCTCG | | |
| EMX1_2C_13 | GAGTCCGAGCAGA | ATGGGAGCACTTCTTCTT | 13 | 13 |
| | AGAAGAA | CTGCTCGG | | |
| EMX1_2C_14 | GAGTCCGAGCAGA | ATGGGAGCACTTCTTCTT | 14 | 13 |
| | AGAAGAA | CTGCTCGGA | | |
| EMX1_2C_15 | GAGTCCGAGCAGA | ATGGGAGCACTTCTTCTT | 15 | 13 |
| | AGAAGAA | CTGCTCGGAC | | |
| EMX1_2C_16 | GAGTCCGAGCAGA | ATGGGAGCACTTCTTCTT | 16 | 13 |
| | AGAAGAA | CTGCTCGGACT | | |
| EMX1_2C_17 | GAGTCCGAGCAGA | ATGGGAGCACTTCTTCTT | 17 | 13 |
| | AGAAGAA | CTGCTCGGACTC | | |
| FANCF_2C_8 | GGAATCCCTTCTGC | GGAAAAGCGATCAAGGT | 8 | 17 |
| | AGCACC | GCTGCAGA | | |
| FANCF_2C_9 | GGAATCCCTTCTGC | GGAAAAGCGATCAAGGT | 9 | 17 |
| | AGCACC | GCTGCAGAA | | |
| FANCF_2C_10 | GGAATCCCTTCTGC | GGAAAAGCGATCAAGGT | 10 | 17 |
| | AGCACC | GCTGCAGAAG | | |
| FANCF_2C_11 | GGAATCCCTTCTGC | GGAAAAGCGATCAAGGT | 11 | 17 |
| | AGCACC | GCTGCAGAAGG | | |
| FANCF_2C_12 | GGAATCCCTTCTGC | GGAAAAGCGATCAAGGT | 12 | 17 |
| | AGCACC | GCTGCAGAAGGG | | |
| FANCF_2C_13 | GGAATCCCTTCTGC | GGAAAAGCGATCAAGGT | 13 | 17 |
| | AGCACC | GCTGCAGAAGGGA | | |
| FANCF_2C_14 | GGAATCCCTTCTGC | GGAAAAGCGATCAAGGT | 14 | 17 |
| | AGCACC | GCTGCAGAAGGGAT | | |
| FANCF_2C_15 | GGAATCCCTTCTGC | GGAAAAGCGATCAAGGT | 15 | 17 |
| | AGCACC | GCTGCAGAAGGGATT | | |
| FANCF_2C_16 | GGAATCCCTTCTGC | GGAAAAGCGATCAAGGT | 16 | 17 |
| | AGCACC | GCTGCAGAAGGGATTC | | |
| FANCF_2C_17 | GGAATCCCTTCTGC | GGAAAAGCGATCAAGGT | 17 | 17 |
| | AGCACC | GCTGCAGAAGGGATTCC | | |
| RNF2_2C_9 | GTCATCTTAGTCAT | GAACACCTCATGTAATG | 9 | 11 |
| | TACCTG | ACT | | |
| RNF2_2C_10 | GTCATCTTAGTCAT | GAACACCTCATGTAATG | 10 | 11 |
| | TACCTG | ACTA | | |
| RNF2_2C_11 | GTCATCTTAGTCAT | GAACACCTCATGTAATG | 11 | 11 |
| | TACCTG | ACTAA | | |
| RNF2_2C_12 | GTCATCTTAGTCAT | GAACACCTCATGTAATG | 12 | 11 |
| | TACCTG | ACTAAG | | |
| RNF2_2C_13 | GTCATCTTAGTCAT | GAACACCTCATGTAATG | 13 | 11 |
| | TACCTG | ACTAAGA | | |
| RNF2_2C_14 | GTCATCTTAGTCAT | GAACACCTCATGTAATG | 14 | 11 |
| | TACCTG | ACTAAGAT | | |
| RNF2_2C_15 | GTCATCTTAGTCAT | GAACACCTCATGTAATG | 15 | 11 |
| | TACCTG | ACTAAGATG | | |
| RNF2_2C_16 | GTCATCTTAGTCAT | GAACACCTCATGTAATG | 16 | 11 |
| | TACCTG | ACTAAGATGA | | |
| RNF2_2C_17 | GTCATCTTAGTCAT | GAACACCTCATGTAATG | 17 | 11 |
| | TACCTG | ACTAAGATGAC | | |
| HEK4_2C_7 | GGCACTGCGGCTG | GCTTTAACCCCAACCTC | 7 | 13 |
| | GAGGTGG | CAG | | |
| HEK4_2C_8 | GGCACTGCGGCTG | GCTTTAACCCCAACCTC | 8 | 13 |
| | GAGGTGG | CAGC | | |
| HEK4_2C_9 | GGCACTGCGGCTG | GCTTTAACCCCAACCTC | 9 | 13 |
| | GAGGTGG | CAGCC | | |
| HEK4_2C_10 | GGCACTGCGGCTG | GCTTTAACCCCAACCTC | 10 | 13 |
| | GAGGTGG | CAGCCG | | |
| HEK4_2C_11 | GGCACTGCGGCTG | GCTTTAACCCCAACCTC | 11 | 13 |
| | GAGGTGG | CAGCCGC | | |
| HEK4_2C_12 | GGCACTGCGGCTG | GCTTTAACCCCAACCTC | 12 | 13 |
| | GAGGTGG | CAGCCGCA | | |
| HEK4_2C_13 | GGCACTGCGGCTG | GCTTTAACCCCAACCTC | 13 | 13 |
| | GAGGTGG | CAGCCGCAG | | |
| HEK4_2C_14 | GGCACTGCGGCTG | GCTTTAACCCCAACCTC | 14 | 13 |
| | GAGGTGG | CAGCCGCAGT | | |
| HEK4_2C_15 | GGCACTGCGGCTG | GCTTTAACCCCAACCTC | 15 | 13 |
| | GAGGTGG | CAGCCGCAGTG | | |
| HEK3_2C_1TDEL | GGCCCAGACTGAG | TCTGCCATCCGTGCTCAG | 13 | 10 |
| | CACGTGA | TCTG | | |
| HEK3_2C_1AINS | GGCCCAGACTGAG | TCTGCCATCATCGTGCTC | 13 | 10 |
| | CACGTGA | AGTCTG | | |
| HEK3_2C_1CTTINS | GGCCCAGACTGAG | TCTGCCATCAAAGCGTG | 13 | 10 |
| | CACGTGA | CTCAGTCTG | | |
| HEK3_2D 10 | GGCCCAGACTGAG | TCTGCCATCTCGTGCTCA | 13 | 10 |
| | CACGTGA | GTCTG | | |
| HEK3_2D_11 | GGCCCAGACTGAG | CTCTGCCATCTCGTGCTC | 13 | 11 |
| | CACGTGA | AGTCTG | | |
| HEK3_2D_12 | GGCCCAGACTGAG | CCTCTGCCATCTCGTGCT | 13 | 12 |
| | CACGTGA | CAGTCTG | | |
| HEK3_2D_13 | GGCCCAGACTGAG | TCCTCTGCCATCTCGTGC | 13 | 13 |
| | CACGTGA | TCAGTCTG | | |
| HEK3_2D_14 | GGCCCAGACTGAG | TTCCTCTGCCATCTCGTG | 13 | 14 |
| | CACGTGA | CTCAGTCTG | | |
| HEK3_2D_15 | GGCCCAGACTGAG | TTTCCTCTGCCATCTCGT | 13 | 15 |
| | CACGTGA | GCTCAGTCTG | | |
| HEK3_2D_16 | GGCCCAGACTGAG | CTTTCCTCTGCCATCTCG | 13 | 16 |
| | CACGTGA | TGCTCAGTCTG | | |
| HEK3_2D_17 | GGCCCAGACTGAG | CCTTTCCTCTGCCATCTC | 13 | 17 |
| | CACGTGA | GTGCTCAGTCTG | | |
| HEK3_2D_18 | GGCCCAGACTGAG | TCCTTTCCTCTGCCATCT | 13 | 18 |
| | CACGTGA | CGTGCTCAGTCTG | | |
| HEK3_2D_19 | GGCCCAGACTGAG | TTCCTTTCCTCTGCCATC | 13 | 19 |
| | CACGTGA | TCGTGCTCAGTCTG | | |
| HEK3_2D_20 | GGCCCAGACTGAG | CTTCCTTTCCTCTGCCAT | 13 | 20 |
| | CACGTGA | CTCGTGCTCAGTCTG | | |
| EMX1_2D_10 | GAGTCCGAGCAGA | GGAGCCCTTGTTCTTCTG | 13 | 10 |
| | AGAAGAA | CTCGG | | |
| EMX1_2D_11 | GAGTCCGAGCAGA | GGGAGCCCTTGTTCTTCT | 13 | 11 |
| | AGAAGAA | GCTCGG | | |
| EMX1_2D_12 | GAGTCCGAGCAGA | TGGGAGCCCTTGTTCTTC | 13 | 12 |
| | AGAAGAA | TGCTCGG | | |
| EMX1_2D_13 | GAGTCCGAGCAGA | ATGGGAGCCCTTGTTCTT | 13 | 13 |
| | AGAAGAA | CTGCTCGG | | |
| EMX1_2D_14 | GAGTCCGAGCAGA | GATGGGAGCCCTTGTTC | 13 | 14 |
| | AGAAGAA | TTCTGCTCGG | | |
| EMX1_2D_15 | GAGTCCGAGCAGA | TGATGGGAGCCCTTGTT | 13 | 15 |
| | AGAAGAA | CTTCTGCTCGG | | |
| EMX1_2D_16 | GAGTCCGAGCAGA | GTGATGGGAGCCCTTGT | 13 | 16 |
| | AGAAGAA | TCTTCTGCTCGG | | |
| EMX1_2D_17 | GAGTCCGAGCAGA | TGTGATGGGAGCCCTTG | 13 | 17 |
| | AGAAGAA | TTCTTCTGCTCGG | | |
| EMX1_2D_18 | GAGTCCGAGCAGA | ATGTGATGGGAGCCCTT | 13 | 18 |
| | AGAAGAA | GTTCTTCTGCTCGG | | |
| EMX1_2D_19 | GAGTCCGAGCAGA | GATGTGATGGGAGCCCT | 13 | 19 |
| | AGAAGAA | TGTTCTTCTGCTCGG | | |
| EMX1_2D_20 | GAGTCCGAGCAGA | TGATGTGATGGGAGCCC | 13 | 20 |
| | AGAAGAA | TTGTTCTTCTGCTCGG | | |
| FANCF_2D_10 | GGAATCCCTTCTGC | CGATCAAGGTGCTGCAG | 13 | 10 |
| | AGCACC | AAGGGA | | |
| FANCF_2D_11 | GGAATCCCTTCTGC | GCGATCAAGGTGCTGCA | 13 | 11 |
| | AGCACC | GAAGGGA | | |
| FANCF_2D_12 | GGAATCCCTTCTGC | AGCGATCAAGGTGCTGC | 13 | 12 |
| | AGCACC | AGAAGGGA | | |
| FANCF_2D_13 | GGAATCCCTTCTGC | AAGCGATCAAGGTGCTG | 13 | 13 |
| | AGCACC | CAGAAGGGA | | |
| FANCF_2D_14 | GGAATCCCTTCTGC | AAAGCGATCAAGGTGCT | 13 | 14 |
| | AGCACC | GCAGAAGGGA | | |
| FANCF_2D_15 | GGAATCCCTTCTGC | AAAAGCGATCAAGGTGC | 13 | 15 |
| | AGCACC | TGCAGAAGGGA | | |
| FANCF_2D_16 | GGAATCCCTTCTGC | GAAAAGCGATCAAGGTG | 13 | 16 |
| | AGCACC | CTGCAGAAGGGA | | |
| FANCF_2D_17 | GGAATCCCTTCTGC | GGAAAAGCGATCAAGGT | 13 | 17 |
| | AGCACC | GCTGCAGAAGGGA | | |
| FANCF_2D_18 | GGAATCCCTTCTGC | CGGAAAAGCGATCAAGG | 13 | 18 |
| | AGCACC | TGCTGCAGAAGGGA | | |
| FANCF_2D_19 | GGAATCCCTTCTGC | TCGGAAAAGCGATCAAG | 13 | 19 |
| | AGCACC | GTGCTGCAGAAGGGA | | |
| FANCF_2D_20 | GGAATCCCTTCTGC | CTCGGAAAAGCGATCAA | 13 | 20 |
| | AGCACC | GGTGCTGCAGAAGGGA | | |
| RNF2_2D_10 | GTCATCTTAGTCAT | AACACCTCATGTAATGA | 15 | 10 |
| | TACCTG | CTAAGATG | | |
| RNF2_2D_11 | GTCATCTTAGTCAT | GAACACCTCATGTAATG | 15 | 11 |
| | TACCTG | ACTAAGATG | | |
| RNF2_2D_12 | GTCATCTTAGTCAT | CGAACACCTCATGTAAT | 15 | 12 |
| | TACCTG | GACTAAGATG | | |
| RNF2_2D_13 | GTCATCTTAGTCAT | ACGAACACCTCATGTAA | 15 | 13 |
| | TACCTG | TGACTAAGATG | | |
| RNF2_2D_14 | GTCATCTTAGTCAT | AACGAACACCTCATGTA | 15 | 14 |
| | TACCTG | ATGACTAAGATG | | |
| RNF2_2D_15 | GTCATCTTAGTCAT | CAACGAACACCTCATGT | 15 | 15 |
| | TACCTG | AATGACTAAGATG | | |
| RNF2_2D_16 | GTCATCTTAGTCAT | ACAACGAACACCTCATG | 15 | 16 |
| | TACCTG | TAATGACTAAGATG | | |
| RNF2_2D_17 | GTCATCTTAGTCAT | TACAACGAACACCTCAT | 15 | 17 |
| | TACCTG | GTAATGACTAAGATG | | |
| RNF2_2D_18 | GTCATCTTAGTCAT | TTACAACGAACACCTCA | 15 | 18 |
| | TACCTG | TGTAATGACTAAGATG | | |
| RNF2_2D_19 | GTCATCTTAGTCAT | GTTACAACGAACACCTC | 15 | 19 |
| | TACCTG | ATGTAATGACTAAGATG | | |
| RNF2_2D_20 | GTCATCTTAGTCAT | AGTTACAACGAACACCT | 15 | 20 |
| | TACCTG | CATGTAATGACTAAGATG | | |
| HEK4_2D_7 | GGCACTGCGGCTG | ACCCCAACCTCCAGCCG | 11 | 7 |
| | GAGGTGG | C | | |
| HEK4_2D_8 | GGCACTGCGGCTG | AACCCCAACCTCCAGCC | 11 | 8 |
| | GAGGTGG | GC | | |
| HEK4_2D_9 | GGCACTGCGGCTG | TAACCCCAACCTCCAGC | 11 | 9 |
| | GAGGTGG | CGC | | |
| HEK4_2D_10 | GGCACTGCGGCTG | TTAACCCCAACCTCCAG | 11 | 10 |
| | GAGGTGG | CCGC | | |
| HEK4_2D_11 | GGCACTGCGGCTG | TTTAACCCCAACCTCCA | 11 | 11 |
| | GAGGTGG | GCCGC | | |
| HEK4_2D_12 | GGCACTGCGGCTG | CTTTAACCCCAACCTCC | 11 | 12 |
| | GAGGTGG | AGCCGC | | |
| HEK4_2D_13 | GGCACTGCGGCTG | GCTTTAACCCCAACCTC | 11 | 13 |
| | GAGGTGG | CAGCCGC | | |
| HEK4_2D_14 | GGCACTGCGGCTG | CGCTTTAACCCCAACCT | 11 | 14 |
| | GAGGTGG | CCAGCCGC | | |
| HEK4_2D_15 | GGCACTGCGGCTG | CCGCTTTAACCCCAACC | 11 | 15 |
| | GAGGTGG | TCCAGCCGC | | |
| HEK4_2D_16 | GGCACTGCGGCTG | TCCGCTTTAACCCCAAC | 11 | 16 |
| | GAGGTGG | CTCCAGCCGC | | |
| HEK4_2D_17 | GGCACTGCGGCTG | CTCCGCTTTAACCCCAA | 11 | 17 |
| | GAGGTGG | CCTCCAGCCGC | | |
| HEK4_2D_18 | GGCACTGCGGCTG | CTCCGCTTTAACCCCAA | 11 | 18 |
| | GAGGTGG | CCTCCAGCCGC | | |
| HEK4_2D_19 | GGCACTGCGGCTG | CTCCGCTTTAACCCCAA | 11 | 19 |
| | GAGGTGG | CCTCCAGCCGC | | |

TABLE 3B
FIGs. 40A-40C PEgRNA

| | | | | RT |
|---|---|---|---|---|
| | SPACER SEQUENCE | | PBS | TEMPLATE |
| | (SEQ ID NO: | 3′ EXTENSION (SEQ ID | LENGTH | LENGTH |
| PEGRNA | 3104-3112) | NOS: 3113-3121) | (NT) | (NT) |
| RNF2_3B | GTCATCTTAGTCAT | AACGAACACCTCATGTA | 15 | 14 |
| | TACCTG | ATGACTAAGATG | | |
| EMX1_3B | GAGTCCGAGCAGA | ATGGGAGCACTTCTTCT | 15 | 13 |
| | AGAAGAA | TCTGCTCGGAC | | |
| FANCF_3B | GGAATCCCTTCTG | GGAAAAGCGATCAAGGT | 15 | 17 |
| | CAGCACC | GCTGCAGAAGGGATT | | |
| HE3_3B | GGCCCAGACTGAG | TCTGCCATGACGTGCTC | 13 | 10 |
| | CACGTGA | AGTCTG | | |
| HEK4_3B | GGCACTGCGGCTG | TTAACCCCAACCTCCAG | 9 | 10 |
| | GAGGTGG | CC | | |
| RNF2_3C_4ATOC | GTCATCTTAGTCAT | AACGAACACCGCAGGTA | 15 | 14 |
| | TACCTG | ATGACTAAGATG | | |
| RNF2_3C_4ATOG | GTCATCTTAGTCAT | AACGAACACCCCAGGTA | 15 | 14 |
| | TACCTG | ATGACTAAGATG | | |
| FANCF_3C_5GTOT | GGAATCCCTTCTG | GGAAAAGCGATCAAGGT | 13 | 17 |
| | CAGCACC | GCTGCAGAAGGGA | | |
| FANCF_3C_7ATOC | GGAATCCCTTCTG | GGAAAAGCGAGCCAGG | 14 | 17 |
| | CAGCACC | TGCTGCAGAAGGGAT | | |

TABLE 3C
FIGs. 40A-40C nicking sgRNA sequences

| | | SEQ ID |
|---|---|---|
| NICKING SGRNA | SPACER SEQUENCE | NO: |
| RNF2_2B_+41 | GTCAACCATTAAGCAAAACAT | 3122 |
| RNF2_2B_+67 | GTCTCAGGCTGTGCAGACAAA | 3123 |
| EMX1_2B_−116 | GGGGCACAGATGAGAAACTC | 3124 |
| EMX1_2B_−57 | GCCGTTTGTACTTTGTCCTC | 3125 |
| EMX1_2B_+14 | GCGCCACCGGTTGATGTGAT | 3126 |
| EMX1_2B_+27 | GCTTCGTGGCAATGCGCCAC | 3127 |
| EMX1_2B_+53 | GACATCGATGTCCTCCCCAT | 3128 |
| EMX1_2B_+80 | GTGGTTGCCCACCCTAGTCAT | 3129 |
| FANCF_2B_−78 | GCGACTCTCTGCGTACTGAT | 3130 |
| FANCF_2B_−50 | GCCCTACTTCCGCTTTCACCT | 3131 |
| FANCF_2B_−27 | GGATTCCATGAGGTGCGCGA | 3132 |
| FANCF_2B_−17 | GCTGCAGAAGGGATTCCATG | 3133 |
| FANCF_2B_+21 | GCTTGAGACCGCCAGAAGCT | 3134 |
| FANCF_2B_+48 | GGGGTCCCAGGTGCTGACGT | 3135 |
| HEK3_2B_−108 | GCAGAAATAGACTAATTGCA | 3136 |
| HEK3_2B_−38 | GGATTGACCCAGGCCAGGGC | 3137 |
| HEK3_2B_+26 | GACGCCCTCTGGAGGAAGCA | 3138 |
| HEK3_2B_+37 | GCTGTCCTGCGACGCCCTC | 3139 |
| HEK3_2B_+63 | GCACATACTAGCCCCTGTCT | 3140 |
| HEK3_2B_+90 | GTCAACCAGTATCCCGGTGC | 3141 |
| HEK4_2B_−95 | TCCCTTCCTTCCACCCAGCC | 3142 |
| HEK4_2B_−51 | CCCTGCCTGTCATCCTGCTT | 3143 |
| HEK4_2B_−26 | GCAGTGCCACCGGGGCGCCG | 3144 |
| HEK4_2B_+52 | GCGGGGGCTCAGAGAGGGCA | 3145 |
| HEK4_2B_+74 | GAGACACACACACAGGCCTGG | 3146 |
| RNF2_2C_+41 | GTCAACCATTAAGCAAAACAT | 3147 |
| RNF2_2C_4ATOC_+5 | GTGAGTTACAACGAACACCGC | 3148 |
| RNF2_2C_4ATOG_+5 | GTGAGTTACAACGAACACCCC | 3149 |
| FANCF_2C_+48 | GGGGTCCCAGGTGCTGACGT | 3150 |
| FANCF_2C_5GTOT_+7 | GAAGCTCGGAAAAGCGATCA | 3151 |
| FANCF_2C_7ATOC_+7 | GAAGCTCGGAAAAGCGAGCC | 3152 |
| HEK3_2C_+90 | GTCAACCAGTATCCCGGTGC | 3153 |

TABLE 3D
FIGs. 41A-41K PEgRNA

| | | | | RT |
|---|---|---|---|---|
| | SPACER SEQUENCE | | PBS | TEMPLATE |
| | (SEQ ID NO: | 3′ EXTENSION (SEQ ID | LENGTH | LENGTH |
| PEGRNA | 3154-3304) | NO: 3305-3455) | (NT) | (NT) |
| HEK3_4A_1TTOA | GGCCCAGACTGAG | TCTGCCATCTCGTGCTCA | 13 | 10 |
| | CACGTGA | GTCTG | | |
| HEK3_4A_1TTOC | GGCCCAGACTGAG | TCTGCCATCGCGTGCTCA | 13 | 10 |
| | CACGTGA | GTCTG | | |
| HEK3_4A_1TTOG | GGCCCAGACTGAG | TCTGCCATCCCGTGCTCA | 13 | 10 |
| | CACGTGA | GTCTG | | |
| HEK3_4A_2GTOA | GGCCCAGACTGAG | TCTGCCATTACGTGCTCA | 13 | 10 |
| | CACGTGA | GTCTG | | |
| HEK3_4A_2GTOC | GGCCCAGACTGAG | TCTGCCATGACGTGCTCA | 13 | 10 |
| | CACGTGA | GTCTG | | |
| HEK3_4A_2GTOT | GGCCCAGACTGAG | TCTGCCATAACGTGCTCA | 13 | 10 |
| | CACGTGA | GTCTG | | |
| HEK3_4A_3ATOC | GGCCCAGACTGAG | TCTGCCAGCACGTGCTCA | 13 | 10 |
| | CACGTGA | GTCTG | | |
| HEK3_4A_3ATOG | GGCCCAGACTGAG | TCTGCCACCACGTGCTCA | 13 | 10 |
| | CACGTGA | GTCTG | | |
| HEK3_4A_3ATOT | GGCCCAGACTGAG | TCTGCCAACACGTGCTCA | 13 | 10 |
| | CACGTGA | GTCTG | | |
| HEK3_4A_4TTOA | GGCCCAGACTGAG | TCTGCCTTCACGTGCTCA | 13 | 10 |
| | CACGTGA | GTCTG | | |
| HEK3_4A_4TTOC | GGCCCAGACTGAG | TCTGCCGTCACGTGCTCA | 13 | 10 |
| | CACGTGA | GTCTG | | |
| HEK3_4A_4TTOG | GGCCCAGACTGAG | TCTGCCCTCACGTGCTCA | 13 | 10 |
| | CACGTGA | GTCTG | | |
| HEK3_4A_5GTOA | GGCCCAGACTGAG | TCTGCTATCACGTGCTCA | 13 | 10 |
| | CACGTGA | GTCTG | | |
| HEK3_4A_5GTOC | GGCCCAGACTGAG | TCTGCGATCACGTGCTCA | 13 | 10 |
| | CACGTGA | GTCTG | | |
| HEK3_4A_5GTOT | GGCCCAGACTGAG | TCTGCAATCACGTGCTCA | 13 | 10 |
| | CACGTGA | GTCTG | | |
| HEK3_4A_6GTOA | GGCCCAGACTGAG | TCTGTCATCACGTGCTCA | 13 | 10 |
| | CACGTGA | GTCTG | | |
| HEK3_4A_6GTOC | GGCCCAGACTGAG | TCTGGCATCACGTGCTCA | 13 | 10 |
| | CACGTGA | GTCTG | | |
| HEK3_4A_6GTOT | GGCCCAGACTGAG | TCTGACATCACGTGCTCA | 13 | 10 |
| | CACGTGA | GTCTG | | |
| HEK3_4A_7CTOA | GGCCCAGACTGAG | TCTTCCATCACGTGCTCA | 13 | 10 |
| | CACGTGA | GTCTG | | |
| HEK3_4A_7CTOG | GGCCCAGACTGAG | TCTCCCATCACGTGCTCA | 13 | 10 |
| | CACGTGA | GTCTG | | |
| HEK3_4A_7CTOT | GGCCCAGACTGAG | TCTACCATCACGTGCTCA | 13 | 10 |
| | CACGTGA | GTCTG | | |
| HEK3_4A_8ATOC | GGCCCAGACTGAG | TCGGCCATCACGTGCTCA | 13 | 10 |
| | CACGTGA | GTCTG | | |
| HEK3_4A_8ATOG | GGCCCAGACTGAG | TCCGCCATCACGTGCTCA | 13 | 10 |
| | CACGTGA | GTCTG | | |
| HEK3_4A_8ATOT | GGCCCAGACTGAG | TCAGCCATCACGTGCTCA | 13 | 10 |
| | CACGTGA | GTCTG | | |
| HEK3_4B_1TTOA | GGCCCAGACTGAG | TGGAGGAAGCAGGGCTT | 13 | 34 |
| | CACGTGA | CCTTTCCTCTGCCATCTC | | |
| | | GTGCTCAGTCTG | | |
| HEK3_4B_12GTOC | GGCCCAGACTGAG | TGGAGGAAGCAGGGCTT | 13 | 34 |
| | CACGTGA | CCTTTGCTCTGCCATCAC | | |
| | GTGCTCAGTCTG | | | |
| HEK3_4B_14ATOT | GGCCCAGACTGAG | TGGAGGAAGCAGGGCTT | 13 | 34 |
| | CACGTGA | CCTATCCTCTGCCATCAC | | |
| | | GTGCTCAGTCTG | | |
| HEK3_4B_17GTOC | GGCCCAGACTGAG | TGGAGGAAGCAGGGCTT | 13 | 34 |
| | CACGTGA | GCTTTCCTCTGCCATCAC | | |
| | | GTGCTCAGTCTG | | |
| HEK3_4B_20GTOC | GGCCCAGACTGAG | TGGAGGAAGCAGGGGTT | 13 | 34 |
| | CACGTGA | CCTTTCCTCTGCCATCAC | | |
| | | GTGCTCAGTCTG | | |
| HEK3_4B_23CTOG | GGCCCAGACTGAG | TGGAGGAAGCACGGCTT | 13 | 34 |
| | CACGTGA | CCTTTCCTCTGCCATCAC | | |
| | | GTGCTCAGTCTG | | |
| HEK3_4B_24TTOA | GGCCCAGACTGAG | TGGAGGAAGCTGGGCTT | 13 | 34 |
| | CACGTGA | CCTTTCCTCTGCCATCAC | | |
| | | GTGCTCAGTCTG | | |
| HEK3_4B_26CTOG | GGCCCAGACTGAG | TGGAGGAACCAGGGCTT | 13 | 34 |
| | CACGTGA | CCTTTCCTCTGCCATCAC | | |
| | | GTGCTCAGTCTG | | |
| HEK3_4B_30CTOG | GGCCCAGACTGAG | TGGACGAAGCAGGGCTT | 13 | 34 |
| | CACGTGA | CCTTTCCTCTGCCATCAC | | |
| | | GTGCTCAGTCTG | | |
| HEK3_4B_33CTOG | GGCCCAGACTGAG | TCGAGGAAGCAGGGCTT | 13 | 34 |
| | CACGTGA | CCTTTCCTCTGCCATCAC | | |
| | GTGCTCAGTCTG | | | |
| RNF2_4C_1CTOA | GTCATCTTAGTCATT | AACGAACACCTCATGTAA | 15 | 14 |
| | ACCTG | TGACTAAGATG | | |
| RNF2_4C_1CTOG | GTCATCTTAGTCATT | AACGAACACCTCACGTA | 15 | 14 |
| | ACCTG | ATGACTAAGATG | | |
| RNF2_4C_1CTOT | GTCATCTTAGTCATT | AACGAACACCTCAAGTA | 15 | 14 |
| | ACCTG | ATGACTAAGATG | | |
| RNF2_4C_2TTOA | GTCATCTTAGTCATT | AACGAACACCTCTGGTA | 15 | 14 |
| | ACCTG | ATGACTAAGATG | | |
| RNF2_4C_2TTOG | GTCATCTTAGTCATT | AACGAACACCTCCGGTA | 15 | 14 |
| | ACCTG | ATGACTAAGATG | | |
| RNF2_4C_3GTOC | GTCATCTTAGTCATT | AACGAACACCTGAGGTA | 15 | 14 |
| | ACCTG | ATGACTAAGATG | | |
| RNF2_4C_4ATOC | GTCATCTTAGTCATT | AACGAACACCGCAGGTA | 15 | 14 |
| | ACCTG | ATGACTAAGATG | | |
| RNF2_4C_4ATOT | GTCATCTTAGTCATT | AACGAACACCACAGGTA | 15 | 14 |
| | ACCTG | ATGACTAAGATG | | |
| RNF2_4C_4ATOG | GTCATCTTAGTCATT | AACGAACACCCCAGGTA | 15 | 14 |
| | ACCTG | ATGACTAAGATG | | |
| RNF2_4C_5GTOT | GTCATCTTAGTCATT | AACGAACACATCAGGTA | 15 | 14 |
| | ACCTG | ATGACTAAGATG | | |
| RNF2_4C_6GTOA | GTCATCTTAGTCATT | AACGAACATCTCAGGTA | 15 | 14 |
| | ACCTG | ATGACTAAGATG | | |
| RNF2_4C_7TTOC | GTCATCTTAGTCATT | AACGAACGCCTCAGGTA | 15 | 14 |
| | ACCTG | ATGACTAAGATG | | |
| FANCF_4D_1ATOG | GGAATCCCTTCTGC | GGAAAAGCGATCCAGGC | 14 | 17 |
| | AGCACC | GCTGCAGAAGGGAT | | |
| FANCF_4D_1ATOT | GGAATCCCTTCTGC | GGAAAAGCGATCCAGGA | 14 | 17 |
| | AGCACC | GCTGCAGAAGGGAT | | |
| FANCF_4D_2CTOA | GGAATCCCTTCTGC | GGAAAAGCGATCCAGTT | 14 | 17 |
| | AGCACC | GCTGCAGAAGGGAT | | |
| FANCF_4D_3CTOG | GGAATCCCTTCTGC | GGAAAAGCGATCCACGT | 14 | 17 |
| | AGCACC | GCTGCAGAAGGGAT | | |
| FANCF_4D_3CTOT | GGAATCCCTTCTGC | GGAAAAGCGATCCAAGT | 14 | 17 |
| | AGCACC | GCTGCAGAAGGGAT | | |
| FANCF_4D_4TTOA | GGAATCCCTTCTGC | GGAAAAGCGATCCTGGT | 14 | 17 |
| | AGCACC | GCTGCAGAAGGGAT | | |
| FANCF_4D_4TTOG | GGAATCCCTTCTGC | GGAAAAGCGATCCCGGT | 14 | 17 |
| | AGCACC | GCTGCAGAAGGGAT | | |
| FANCF_4D_5GTOA | GGAATCCCTTCTGC | GGAAAAGCGATCTAGGT | 14 | 17 |
| | AGCACC | GCTGCAGAAGGGAT | | |
| FANCF_4D_6GTOC | GGAATCCCTTCTGC | GGAAAAGCGATGCAGGT | 14 | 17 |
| | AGCACC | GCTGCAGAAGGGAT | | |
| FANCF_4D_7ATOC | GGAATCCCTTCTGC | GGAAAAGCGAGCCAGGT | 14 | 17 |
| | AGCACC | GCTGCAGAAGGGAT | | |
| FANCF_4D_8TTOC | GGAATCCCTTCTGC | GGAAAAGCGGTCCAGGT | 14 | 17 |
| | AGCACC | GCTGCAGAAGGGAT | | |
| FANCF_4D_10GTOT | GGAATCCCTTCTGC | GGAAAAGAGATCCAGGT | 14 | 17 |
| | AGCACC | GCTGCAGAAGGGAT | | |
| EMX1_4E_2ATOC | GAGTCCGAGCAGA | GTGATGGGAGCCCTGCTT | 14 | 16 |
| | AGAAGAA | CTTCTGCTCGGA | | |
| EMX1_4E_2ATOT | GAGTCCGAGCAGA | GTGATGGGAGCCCTACTT | 14 | 16 |
| | AGAAGAA | CTTCTGCTCGGA | | |
| EMX1_4E_3ATOG | GAGTCCGAGCAGA | GTGATGGGAGCCCCTCTT | 14 | 16 |
| | AGAAGAA | CTTCTGCTCGGA | | |
| EMX1_4E_4GTOC | GAGTCCGAGCAGA | GTGATGGGAGCCGTTCTT | 14 | 16 |
| | AGAAGAA | CTTCTGCTCGGA | | |
| EMX1_4E_5GTOA | GAGTCCGAGCAGA | GTGATGGGAGCTCTTCTT | 14 | 16 |
| | AGAAGAA | CTTCTGCTCGGA | | |
| EMX1_4E_5GTOT | GAGTCCGAGCAGA | GTGATGGGAGCACTTCTT | 14 | 16 |
| | AGAAGAA | CTTCTGCTCGGA | | |
| EMX1_4E_7CTOA | GAGTCCGAGCAGA | GTGATGGGATCCCTTCTT | 14 | 16 |
| | AGAAGAA | CTTCTGCTCGGA | | |
| EMX1_4E_8TTOA | GAGTCCGAGCAGA | GTGATGGGTGCCCTTCTT | 14 | 16 |
| | AGAAGAA | CTTCTGCTCGGA | | |
| EMX1_4E_8TTOC | GAGTCCGAGCAGA | GTGATGGGGGCCCTTCTT | 14 | 16 |
| | AGAAGAA | CTTCTGCTCGGA | | |
| EMX1_4E_8TTOG | GAGTCCGAGCAGA | GTGATGGGCGCCCTTCTT | 14 | 16 |
| | AGAAGAA | CTTCTGCTCGGA | | |
| EMX1_4E_9CTOG | GAGTCCGAGCAGA | GTGATGGCAGCCCTTCTT | 14 | 16 |
| | AGAAGAA | CTTCTGCTCGGA | | |
| EMX1_4E_9CTOT | GAGTCCGAGCAGA | GTGATGGAAGCCCTTCTT | 14 | 16 |
| | AGAAGAA | CTTCTGCTCGGA | | |
| RUNX1_4F_1CTOA | GCATTTTCAGGAGG | TGTCTGAAGCCATCTCTT | 15 | 15 |
| | AAGCGA | CCTCCTGAAAAT | | |
| RUNX1_4F_1CTOG | GCATTTTCAGGAGG | TGTCTGAAGCCATCCCTT | 15 | 15 |
| | AAGCGA | CCTCCTGAAAAT | | |
| RUNX1_4F_1CTOT | GCATTTTCAGGAGG | TGTCTGAAGCCATCACTT | 15 | 15 |
| | AAGCGA | CCTCCTGAAAAT | | |
| RUNX1_4F_2GTOA | GCATTTTCAGGAGG | TGTCTGAAGCCATTGCTT | 15 | 15 |
| | AAGCGA | CCTCCTGAAAAT | | |
| RUNX1_4F_3ATOC | GCATTTTCAGGAGG | TGTCTGAAGCCAGCGCTT | 15 | 15 |
| | AAGCGA | CCTCCTGAAAAT | | |
| RUNX1_4F_3ATOG | GCATTTTCAGGAGG | TGTCTGAAGCCACCGCTT | 15 | 15 |
| | AAGCGA | CCTCCTGAAAAT | | |
| RUNX1_4F_3ATOT | GCATTTTCAGGAGG | TGTCTGAAGCCAACGCTT | 15 | 15 |
| | AAGCGA | CCTCCTGAAAAT | | |
| RUNX1_4F_4TTOA | GCATTTTCAGGAGG | TGTCTGAAGCCTTCGCTT | 15 | 15 |
| | AAGCGA | CCTCCTGAAAAT | | |
| RUNX1_4F_4TTOC | GCATTTTCAGGAGG | TGTCTGAAGCCGTCGCTT | 15 | 15 |
| | AAGCGA | CCTCCTGAAAAT | | |
| RUNX1_4F_4TTOG | GCATTTTCAGGAGG | TGTCTGAAGCCCTCGCTT | 15 | 15 |
| | AAGCGA | CCTCCTGAAAAT | | |
| RUNX1_4F_5GTOT | GCATTTTCAGGAGG | TGTCTGAAGCAATCGCTT | 15 | 15 |
| | AAGCGA | CCTCCTGAAAAT | | |
| RUNX1_4F_6GTOC | GCATTTTCAGGAGG | TGTCTGAAGGCATCGCTT | 15 | 15 |
| | AAGCGA | CCTCCTGAAAAT | | |
| VEGFA_4G_1TTOA | GATGTCTGCAGGCC | AATGTGCCATCTGGAGCC | 13 | 22 |
| | AGATGA | CTCTTCTGGCCTGCAGA | | |
| VEGFA_4G_1TTOC | GATGTCTGCAGGCC | AATGTGCCATCTGGAGCC | 13 | 22 |
| | AGATGA | CTCGTCTGGCCTGCAGA | | |
| VEGFA_4G_1TTOG | GATGTCTGCAGGCC | AATGTGCCATCTGGAGCC | 13 | 22 |
| | AGATGA | CTCCTCTGGCCTGCAGA | | |
| VEGFA_4G_2GTOA | GATGTCTGCAGGCC | AATGTGCCATCTGGAGCC | 13 | 22 |
| | AGATGA | CTTATCTGGCCTGCAGA | | |
| VEGFA_4G_3ATOC | GATGTCTGCAGGCC | AATGTGCCATCTGGAGCC | 13 | 22 |
| | AGATGA | CGCATCTGGCCTGCAGA | | |
| VEGFA_4G_3ATOG | GATGTCTGCAGGCC | AATGTGCCATCTGGAGCC | 13 | 22 |
| | AGATGA | CCCATCTGGCCTGCAGA | | |
| VEGFA_4G_3ATOT | GATGTCTGCAGGCC | AATGTGCCATCTGGAGCC | 13 | 22 |
| | AGATGA | CACATCTGGCCTGCAGA | | |
| VEGFA_4G_5GTOT | GATGTCTGCAGGCC | AATGTGCCATCTGGAGCA | 13 | 22 |
| | AGATGA | CTCATCTGGCCTGCAGA | | |
| VEGFA_4G_6GTOC | GATGTCTGCAGGCC | AATGTGCCATCTGGAGGC | 13 | 22 |
| | AGATGA | CTCATCTGGCCTGCAGA | | |
| VEGFA_4G_7CTOA | GATGTCTGCAGGCC | AATGTGCCATCTGGATCC | 13 | 22 |
| | AGATGA | CTCATCTGGCCTGCAGA | | |
| VEGFA_4G_7CTOT | GATGTCTGCAGGCC | AATGTGCCATCTGGAACC | 13 | 22 |
| | AGATGA | CTCATCTGGCCTGCAGA | | |
| VEGFA_4G_9CTOG | GATGTCTGCAGGCC | AATGTGCCATCTGCAGCC | 13 | 22 |
| | AGATGA | CTCATCTGGCCTGCAGA | | |
| DNMT1_4H_1ATOC | GATTCCTGGTGCCA | GTCACCCCTGGTTCTGGC | 13 | 11 |
| | GAAACA | ACCAGG | | |
| DNMT1_4H_1ATOG | GATTCCTGGTGCCA | GTCACCCCTGCTTCTGGC | 13 | 11 |
| | GAAACA | ACCAGG | | |
| DNMT1_4H_2CTOA | GATTCCTGGTGCCA | GTCACCCCTTTTTCTGGC | 13 | 11 |
| | GAAACA | ACCAGG | | |
| DNMT1_4H_2CTOG | GATTCCTGGTGCCA | GTCACCCCTCTTTCTGGC | 13 | 11 |
| | GAAACA | ACCAGG | | |
| DNMT1_4H_2CTOT | GATTCCTGGTGCCA | GTCACCCCTATTTCTGGC | 13 | 11 |
| | GAAACA | ACCAGG | | |
| DNMT1_4H_3ATOT | GATTCCTGGTGCCA | GTCACCCCAGTTTCTGGC | 13 | 11 |
| | GAAACA | ACCAGG | | |
| DNMT1_4H_4GTOA | GATTCCTGGTGCCA | GTCACCCTTGTTTCTGGC | 13 | 11 |
| | GAAACA | ACCAGG | | |
| DNMT1_4H_5GTOT | GATTCCTGGTGCCA | GTCACCACTGTTTCTGGC | 13 | 11 |
| | GAAACA | ACCAGG | | |
| DNMT1_4H_6GTOC | GATTCCTGGTGCCA | GTCACGCCTGTTTCTGGC | 13 | 11 |
| | GAAACA | ACCAGG | | |
| DNMT1_4H_8TTOA | GATTCCTGGTGCCA | GCCCTCCCGTCTCCCCTG | 13 | 19 |
| | GAAACA | TTTCTGGCACCAGG | | |
| DNMT1_4H_8TTOC | GATTCCTGGTGCCA | GCCCTCCCGTCGCCCCTG | 13 | 19 |
| | GAAACA | TTTCTGGCACCAGG | | |
| DNMT1_4H_8TTOG | GATTCCTGGTGCCA | GCCCTCCCGTCCCCCCTG | 13 | 19 |
| | GAAACA | TTTCTGGCACCAGG | | |
| HEK3_4J_DEL1-5 | GGCCCAGACTGAG | TGGAGGAAGCAGGGCTT | 13 | 29 |
| | CACGTGA | CCTTTCCTCTGCCGTGCT | | |
| | CAGTCTG | | | |
| HEK3_4J_DEL1-10 | GGCCCAGACTGAG | TGGAGGAAGCAGGGCTT | 13 | 24 |
| | CACGTGA | CCTTTCCCGTGCTCAGTC | | |
| | | TG | | |
| HEK3_4J_DEL1-15 | GGCCCAGACTGAG | TGGAGGAAGCAGGGCTT | 13 | 19 |
| | CACGTGA | CCCGTGCTCAGTCTG | | |
| HEK3_4J_DEL1-25 | GGCCCAGACTGAG | TGTCCTGCGACGCCCTCT | 13 | 26 |
| | CACGTGA | GGAGGAAGCGTGCTCAG | | |
| | | TCTG | | |
| HEK3_4J_DEL1-30 | GGCCCAGACTGAG | TGTCCTGCGACGCCCTCT | 13 | 21 |
| | CACGTGA | GGACGTGCTCAGTCTG | | |
| HEK3_4J_DEL1-80 | GGCCCAGACTGAG | AGTATCCCGGTGCAGGA | 13 | 20 |
| | CACGTGA | GCTCGTGCTCAGTCTG | | |
| HEK3_4I_1AINS | GGCCCAGACTGAG | TCTGCCATCATCGTGCTC | 13 | 11 |
| | CACGTGA | AGTCTG | | |
| HEK3_4I_1CTTINS | GGCCCAGACTGAG | TCTGCCATCAAAGCGTGC | 13 | 13 |
| | CACGTGA | TCAGTCTG | | |
| HEK3_4I_1TDEL | GGCCCAGACTGAG | TCTGCCATCCGTGCTCAG | 13 | 9 |
| | CACGTGA | TCTG | | |
| HEK3_4I_1- | GGCCCAGACTGAG | TGGAGGAAGCAGGGCTT | 13 | 31 |
| 3TGADEL | CACGTGA | CCTTTCCTCTGCCACGTG | | |
| | | CTCAGTCTG | | |
| RNF2_4I_1TINS | GTCATCTTAGTCATT | AACGAACACCTCAGAGT | 15 | 15 |
| | ACCTG | AATGACTAAGATG | | |
| RNF2_4I_1GTAINS | GTCATCTTAGTCATT | AACGAACACCTCAGTAC | 15 | 17 |
| | ACCTG | GTAATGACTAAGATG | | |
| RNF2_4I_4ADEL | GTCATCTTAGTCATT | AACGAACACCCAGGTAA | 15 | 13 |
| | ACCTG | TGACTAAGATG | | |
| RNF2_4I_3-5GAGDEL | GTCATCTTAGTCATT | AACGAACACAGGTAATG | 15 | 11 |
| | ACCTG | ACTAAGATG | | |
| FANCF_4I_3CINS | GGAATCCCTTCTGC | GGAAAAGCGATCCAGGG | 14 | 18 |
| | AGCACC | TGCTGCAGAAGGGAT | | |
| FANCF_4I_4GATINS | GGAATCCCTTCTGC | GGAAAAGCGATCCAATC | 14 | 20 |
| | AGCACC | GGTGCTGCAGAAGGGAT | | |
| FANCF_4I_6GDEL | GGAATCCCTTCTGC | GGAAAAGCGATCAGGTG | 14 | 16 |
| | AGCACC | CTGCAGAAGGGAT | | |
| FANCF_4I_5- | GGAATCCCTTCTGC | GGAAAAGCGAAGGTGCT | 14 | 14 |
| 7GGADEL | AGCACC | GCAGAAGGGAT | | |
| EMX1_4I_6TINS | GAGTCCGAGCAGA | GTGATGGGAGCACCTTCT | 14 | 17 |
| | AGAAGAA | TCTTCTGCTCGGA | | |
| EMX1_4I_1TGCINS | GAGTCCGAGCAGA | GTGATGGGAGCCCTTCGC | 14 | 19 |
| | AGAAGAA | ATTCTTCTGCTCGGA | | |
| EMX1_4I_5GDEL | GAGTCCGAGCAGA | GTGATGGGAGCCTTCTTC | 14 | 15 |
| | AGAAGAA | TTCTGCTCGGA | | |
| EMX1_4I_4- | GAGTCCGAGCAGA | GTGATGGGAGTTCTTCTT | 14 | 13 |
| 6GGGDEL | AGAAGAA | CTGCTCGGA | | |
| RUNX1_4I_1CINS | GCATTTTCAGGAGG | TGTCTGAAGCCATCGGCT | 15 | 16 |
| | AAGCGA | TCCTCCTGAAAAT | | |
| RUNX1_4I_1ATGINS | GCATTTTCAGGAGG | TGTCTGAAGCCATCCATG | 15 | 18 |
| | AAGCGA | CTTCCTCCTGAAAAT | | |
| RUNX1_4I_2GDEL | GCATTTTCAGGAGG | TGTCTGAAGCCATGCTTC | 15 | 14 |
| | AAGCGA | CTCCTGAAAAT | | |
| RUNX1_4I_2- | GCATTTTCAGGAGG | TGTCTGAAGCCGCTTCCT | 15 | 12 |
| 4GATDEL | AAGCGA | CCTGAAAAT | | |
| VEGFA_4I_4CINS | GATGTCTGCAGGCC | AATGTGCCATCTGGAGCC | 13 | 23 |
| | AGATGA | GCTCATCTGGCCTGCAGA | | |
| VEGFA_4I_2ACAINS | GATGTCTGCAGGCC | AATGTGCCATCTGGAGCC | 13 | 25 |
| | AGATGA | CTTGTCATCTGGCCTGCA | | |
| | GA | | | |
| VEGFA_4I_3ADEL | GATGTCTGCAGGCC | AATGTGCCATCTGGAGCC | 13 | 21 |
| | AGATGA | CCATCTGGCCTGCAGA | | |
| VEGFA_4I_2- | GATGTCTGCAGGCC | AATGTGCCATCTGGAGCC | 13 | 19 |
| 4GAGDEL | AGATGA | ATCTGGCCTGCAGA | | |
| DNMT1_4I_4CINS | GATTCCTGGTGCCA | TCCCGTCACCCGCTGTTT | 13 | 16 |
| | GAAACA | CTGGCACCAGG | | |
| DNMT1_4I_1TCAINS | GATTCCTGGTGCCA | TCCCGTCACCCCTGTGAT | 13 | 18 |
| | GAAACA | TTCTGGCACCAGG | | |
| DNMT1_4I_3ADEL | GATTCCTGGTGCCA | TCCCGTCACCCCGTTTCT | 13 | 14 |
| | GAAACA | GGCACCAGG | | |
| DNMT1_4I_3- | GATTCCTGGTGCCA | TCCCGTCACCGTTTCTGG | 13 | 12 |
| 5AGGDEL | GAAACA | CACCAGG | | |
| HEK3_4K_1CTTINS_5GDEL | GGCCCAGACTGAG | TGGAGGAAGCAGGGCTT | 13 | 36 |
| | CACGTGA | CCTTTCCTCTGCATCAAA | | |
| | | GCGTGCTCAGTCTG | | |
| HEK3_4K_1CTTINS_2GTOC | GGCCCAGACTGAG | TGGAGGAAGCAGGGCTT | 13 | 37 |
| | CACGTGA | CCTTTCCTCTGCCATGAA | | |
| | | AGCGTGCTCAGTCTG | | |
| HEK3_4K_3TDEL_5GTOC | GGCCCAGACTGAG | TGGAGGAAGCAGGGCTT | 13 | 33 |
| | CACGTGA | CCTTTCCTCTGCGATCCG | | |
| | | TGCTCAGTCTG | | |
| HEK3_4K_3GTOC_6GTOT | GGCCCAGACTGAG | TGGAGGAAGCAGGGCTT | 13 | 34 |
| | CACGTGA | CCTTTCCTCTGACATGAC | | |
| | | GTGCTCAGTCTG | | |
| RNF2_4K_2AAINS_3- | GTCATCTTAGTCATT | AACGAACACCATTGGTA | 15 | 14 |
| 4GADEL | ACCTG | ATGACTAAGATG | | |
| RNF2_4K_1AINS_5GTOC | GTCATCTTAGTCATT | AACGAACACGTCAGTGT | 15 | 15 |
| | ACCTG | AATGACTAAGATG | | |
| RNF2_4K_1- | GTCATCTTAGTCATT | AACGAACAACTCGTAAT | 15 | 12 |
| 2CTDEL_6GTOT | ACCTG | GACTAAGATG | | |
| RNF2_4K_1CTOA_5GTOT | GTCATCTTAGTCATT | AACGAACACATCATGTAA | 15 | 14 |
| | ACCTG | TGACTAAGATG | | |
| FANCF_4K_1TINS_3- | GGAATCCCTTCTGC | GGAAAAGCGATCGGTAG | 14 | 16 |
| 4TGDEL | AGCACC | CTGCAGAAGGGAT | | |
| FANCF_4K_1TINS_6GTOA | GGAATCCCTTCTGC | GGAAAAGCGATTCAGGT | 14 | 18 |
| | AGCACC | AGCTGCAGAAGGGAT | | |
| FANCF_4K_2CDEL_5GTOT | GGAATCCCTTCTGC | GGAAAAGCGATCAAGTG | 14 | 16 |
| | AGCACC | CTGCAGAAGGGAT | | |

TABLE 3E
FIGs. 41A-41K nicking sgRNA

| | SPACER SEQUENCE (SEQ ID |
|---|---|
| NICKING SGRNA | NOS: 3456-3463) |
| HEK3_4A_+90 | GTCAACCAGTATCCCGGTGC |
| HEK3_4B_+90 | GTCAACCAGTATCCCGGTGC |
| RNF2_4C_+41 | GTCAACCATTAAGCAAAACAT |
| FANCF_4D_+48 | GGGGTCCCAGGTGCTGACGT |
| EMX1_4E_+53 | GACATCGATGTCCTCCCCAT |
| RUNX1_4F_+38 | GATGAAGCACTGTGGGTACGA |
| VEGFA_4G_+57 | GATGTACAGAGAGCCCAGGGC |
| DNMT1_4H_+49 | GCCCTTCAGCTAAAATAAAGG |

TABLE 3F
FIGs. 42A-42H PEgRNA

| | | | | RT |
|---|---|---|---|---|
| | SPACER | | PBS | TEMPLATE |
| | SEQUENCE (SEQ | 3′ EXTENSION (SEQ ID | LENGTH | LENGTH |
| PEGRNA | ID NOS: 3464-3478) | NOS: 3479-3493) | (NT) | (NT) |
| HEK3_5A_C3 | GGCCCAGACTGA | TCTGTCATCACGTGCTCAGT | 13 | 10 |
| | GCACGTGA | CTG | | |
| HEK3_5A_C4 | GGCCCAGACTGA | TCTGCTATCACGTGCTCAGT | 13 | 10 |
| | GCACGTGA | CTG | | |
| HEK3_5A_C7 | GGCCCAGACTGA | TCTGCCATTACGTGCTCAGT | 13 | 10 |
| | GCACGTGA | CTG | | |
| FANCF_5A_C3 | GGAATCCCTTCTG | GGAAAAGTGATCCAGGTGC | 14 | 17 |
| | CAGCACC | TGCAGAAGGGAT | | |
| FANCF_5A_C7 | GGAATCCCTTCTG | GGAAAAGCGATTCAGGTGC | 14 | 17 |
| | CAGCACC | TGCAGAAGGGAT | | |
| FANCF_5A_C8 | GGAATCCCTTCTG | GGAAAAGCGATCTAGGTGC | 14 | 17 |
| | CAGCACC | TGCAGAAGGGAT | | |
| EMX1_5A_C5 | GAGTCCGAGCAG | GTGATGGGAGTCCTTCTTCT | 14 | 16 |
| | AAGAAGAA | TCTGCTCGGA | | |
| EMX1_5A_C6 | GAGTCCGAGCAG | GTGATGGGAGCTCTTCTTCT | 14 | 16 |
| | AAGAAGAA | TCTGCTCGGA | | |
| EMX1_5A_C7 | GAGTCCGAGCAG | GTGATGGGAGCCTTTCTTCT | 14 | 16 |
| | AAGAAGAA | TCTGCTCGGA | | |
| EMX1_5C_C5_6 | GAGTCCGAGCAG | GTGATGGGAGTTCTTCTTCT | 14 | 16 |
| | AAGAAGAA | TCTGCTCGGA | | |
| EMX1_5C_C5_7 | GAGTCCGAGCAG | GTGATGGGAGTCTTTCTTCT | 14 | 16 |
| | AAGAAGAA | TCTGCTCGGA | | |
| EMX1_5C_C6_7 | GAGTCCGAGCAG | GTGATGGGAGCTTTTCTTCT | 14 | 16 |
| | AAGAAGAA | TCTGCTCGGA | | |
| EMX1_5C_C5_6_7 | GAGTCCGAGCAG | GTGATGGGAGTTTTTCTTCT | 14 | 16 |
| | AAGAAGAA | TCTGCTCGGA | | |
| HEK3_5D_A5 | GGCCCAGACTGA | TCTGCCGTCACGTGCTCAGT | 13 | 10 |
| | GCACGTGA | CTG | | |
| HEK3_5D_A8 | GGCCCAGACTGA | TCTGCCATCGCGTGCTCAGT | 13 | 10 |
| | GCACGTGA | CTG | | |

TABLE 3G
FIGs. 42A-42H nicking sgRNA

| | POSSIBLE SPACER | POSSIBLE SPACER |
|---|---|---|
| NICKING | SEQUENCE | SEQUENCE (SEQ ID |
| SGRNA | (SEQ ID NOS: 616-618) | NOS: 619-621) |
| HEK3_5A- | GTCAACCAGTATCCCGGTGC | GTCAACCAGTATCCCGGTGC |
| F_+90 | | |
| FANCF_5A- | GGGGTCCCAGGTGCTGACGT | GATGTACAGAGAGCCCAGGG |
| F_+48 | | C |
| EMX1_5A- | GATGTACAGAGAGCCCAGGGC | GGGGTCCCAGGTGCTGACGT |
| F_+57 | | |

TABLE 3H
FIGs. 42A-42H base editing sgRNA

| BASE EDITING | |
|---|---|
| SGRNA | SPACER SEQUENCE |
| HEK3_5A-F_BE | GTGCCATCACGTGCTCAGTCT |
| | (SEQ ID NO: 455) |
| FANCF_5A- | GAGCGATCCAGGTGCTGCAGA |
| F_BE | (SEQ ID NO: 456) |
| EMX1_5A-F_BE | GGAGCCCTTCTTCTTCTGCT |
| | (SEQ ID NO: 457) |

TABLE 3I
FIGs. 42A-42H on-target sgRNA

| ON-TARGET | |
|---|---|
| SGRNA | SPACER SEQUENCE |
| HEK3_5G | GGCCCAGACTGAGCACGTGA (SEQ |
| | ID NO: 510) |
| HEK4_5G | GGCACTGCGGCTGGAGGTGG |
| | (SEQ ID NO: 511) |
| EMX1_5G | GAGTCCGAGCAGAAGAAGAA |
| | (SEQ ID NO: 512) |
| FANCF_5G | GGAATCCCTTCTGCAGCACC (SEQ |
| | ID NO: 513) |

TABLE 3J
FIGs. 42A-42H on-target PEgRNA

| | | | | RT |
|---|---|---|---|---|
| | | | PBS | TEMPLATE |
| ON-TARGET | SPACER SEQUENCE | 3′ EXTENSION (SEQ ID | LENGTH | LENGTH |
| PEGRNA | (SEQ ID NO: 663-677) | NO: 678-692) | (NT) | (NT) |
| HEK3_5G- | GGCCCAGACTGAGC | TCTGCCATCTCGTGCTCA | 13 | 10 |
| H_PEGRNA_1 | ACGTGA | GTCTG | | |
| HEK3_5G- | GGCCCAGACTGAGC | TCTGCCATCAAAGCGTG | 13 | 13 |
| H_PEGRNA_2 | ACGTGA | CTCAGTCTG | | |
| HEK3_5G- | GGCCCAGACTGAGC | TCTGCCATCCGTGCTCA | 13 | 9 |
| H_PEGRNA_3 | ACGTGA | GTCTG | | |
| HEK3_5G- | GGCCCAGACTGAGC | TCTGCGATCACGTGCTC | 13 | 10 |
| H_PEGRNA_4 | ACGTGA | AGTCTG | | |
| HEK4_5G- | GGCACTGCGGCTGG | TTAACGCCCACCTCCAG | 9 | 10 |
| H_PEGRNA_1 | AGGTGG | CC | | |
| HEK4_5G- | GGCACTGCGGCTGG | TTAACCCCCCCCTCCAG | 9 | 10 |
| H_PEGRNA_2 | AGGTGG | CC | | |
| HEK4_5G- | GGCACTGCGGCTGG | TTAACCCCTTACACCTCC | 9 | 13 |
| H_PEGRNA_3 | AGGTGG | AGCC | | |
| HEK4_5G- | GGCACTGCGGCTGG | TTAACCCCCCCTCCAGC | 9 | 9 |
| H_PEGRNA_4 | AGGTGG | C | | |
| EMX1_5G- | GAGTCCGAGCAGAA | GTGATGGGAGCACTTCT | 14 | 16 |
| H_PEGRNA_1 | GAAGAA | TCTTCTGCTCGGA | | |
| EMX1_5G- | GAGTCCGAGCAGAA | GTGATGGGAGCCCTGCT | 14 | 16 |
| H_PEGRNA_2 | GAAGAA | TCTTCTGCTCGGA | | |
| EMX1_5G- | GAGTCCGAGCAGAA | GTGATGGGAGCCCTTCG | 14 | 19 |
| H_PEGRNA_3 | GAAGAA | CATTCTTCTGCTCGGA | | |
| EMX1_5G- | GAGTCCGAGCAGAA | GTGATGGGAGTTCTTCTT | 14 | 13 |
| H_PEGRNA_4 | GAAGAA | CTGCTCGGA | | |
| FANCF_5G- | GGAATCCCTTCTGCA | GGAAAAGCGATGCAGGT | 14 | 17 |
| H_PEGRNA_1 | GCACC | GCTGCAGAAGGGAT | | |
| FANCF_5G- | GGAATCCCTTCTGCA | GGAAAAGCGATCCAGGC | 14 | 17 |
| H_PEGRNA_2 | GCACC | GCTGCAGAAGGGAT | | |
| FANCF_5G- | GGAATCCCTTCTGCA | GGAAAAGCGATCCAATC | 14 | 20 |
| H_PEGRNA_3 | GCACC | GGTGCTGCAGAAGGGAT | | |

TABLE 3K
FIGs. 49A-49BPEgRNA

| | | | | RT |
|---|---|---|---|---|
| | SPACER | | PBS | TEMPLATE |
| | SEQUENCE (SEQ | 3′ EXTENSION (SEQ ID | LENGTH | LENGTH |
| PEGRNA | ID NO: 3494-3521) | NO: 3522-3540) | (NT) | (NT) |
| HEK3_6A_2GTOC | GGCCCAGACTG | TCTGCCATGACGTGCTC | 13 | 10 |
| | AGCACGTGA | AGTCTG | | |
| HEK3_6A_2GTOC | GGCCCAGACTG | | | |
| | AGCACGTGA | | | |
| EMX1_6A_3GTOC | GAGTCCGAGCA | ATGGGAGCCCTTGTTCT | 13 | 13 |
| | GAAGAAGAA | TCTGCTCGG | | |
| EMX1_6A_3GTOC | GAGTCCGAGCA | | | |
| | GAAGAAGAA | | | |
| FANCF_6A_5GTOT | GGAATCCCTTCT | AAAAGCGATCAAGGTGC | 13 | 15 |
| | GCAGCACC | TGCAGAAGGGA | | |
| FANCF_6A_5GTOT | GGAATCCCTTCT | | | |
| | GCAGCACC | | | |
| HEK3_6A_1HIS6INS | GGCCCAGACTG | TGGAGGAAGCAGGGCTT | 13 | 52 |
| | AGCACGTGA | CCTTTCCTCTGCCATCAA | | |
| | | TGATGGTGATGATGGTG | | |
| | | CGTGCTCAGTCTG | | |
| HEK3_6A_1HIS6INS | GGCCCAGACTG | | | |
| | AGCACGTGA | | | |
| HEK3_6A_5GTOT | GGCCCAGACTG | TCTGCAATCACGTGCTC | 13 | 10 |
| | AGCACGTGA | AGTCTG | | |
| HEK3_6A_5GTOT | GGCCCAGACTG | | | |
| | AGCACGTGA | | | |
| HEK3_6A_1CTTINS | GGCCCAGACTG | TCTGCCATCAAAGCGTG | 13 | 10 |
| | AGCACGTGA | CTCAGTCTG | | |
| HEK3_6A_1CTTINS | GGCCCAGACTG | | | |
| | AGCACGTGA | | | |
| HBB_6B_INSALL | GCATGGTGCAC | AGACTTCTCCACAGGAG | 13 | 14 |
| | CTGACTCCTG | TCAGGTGCAC | | |
| HBB_6B_INSALL | GCATGGTGCAC | | | |
| | CTGACTCCTG | | | |
| HBB_6B_CORRECT | GCATGGTGCAC | AGACTTCTCCTCAGGAG | 13 | 14 |
| | CTGACTCCTG | TCAGGTGCAC | | |
| HBB_6B_CORRECT | GCATGGTGCAC | | | |
| | CTGACTCCTG | | | |
| HBB_6B_CORRECT_W_SILENT | GCATGGTGCAC | AGACTTCTCTTCAGGAG | 13 | 14 |
| | CTGACTCCTG | TCAGGTGCAC | | |
| HBB_6B_CORRECT_W_SILENT | GCATGGTGCAC | | | |
| | CTGACTCCTG | | | |
| HEXA_6B_INSTALL | GTACCTGAACC | AGTCAGGGCCATAGGAT | 12 | 14 |
| | GTATATCCTA | AGATATACGGTTC | | |
| HEXA_6B_CORRECT | GATCCTTCCAGT | ACCTGAACCGTATATCCT | 10 | 21 |
| | CAGGGCCAT | ATGGCCCTGACTG | | |
| HEXA_6B_CORRECT_W_SILENT | GATCCTTCCAGT | GTACCTGAACCGTATATC | 9 | 27 |
| | CAGGGCCAT | TTATGGCCCTGACT | | |
| PRNP_6C | GCAGTGGTGGG | ATGTAGACGCCAAGGCC | 12 | 12 |
| | GGGCCTTGG | CCCCACC | | |
| HEK3_6E- | GGCCCAGACTG | TCTGCCATCCCGTGCTC | 13 | 10 |
| G_1TTOG | AGCACGTGA | AGTCTG | | |
| HEK3_6E- | GGCCCAGACTG | TCTGCCATCAAAGCGTG | 13 | 10 |
| G_1CTTINS | AGCACGTGA | CTCAGTCTG | | |
| RNF2_6E- | GTCATCTTAGTC | AACGAACACCTCACGTA | 15 | 14 |
| G_1CTOG | ATTACCTG | ATGACTAAGATG | | |
| HBB_6E- | GCATGGTGCAC | AGACTTCTCCACAGGAG | | |
| G_4ATOT | CTGACTCCTG | TCAGGTGCAC | 13 | 14 |
| HEK3_6H_1HIS6INS | GGCCCAGACTG | TGGAGGAAGCAGGGCTT | 13 | 52 |
| | AGCACGTGA | CCTTTCCTCTGCCATCAA | | |
| | | TGATGGTGATGATGGTG | | |
| | | CGTGCTCAGTCTG | | |
| HEK3_6H_1FLAGINS | GGCCCAGACTG | TGGAGGAAGCAGGGCTT | 13 | 58 |
| | AGCACGTGA | CCTTTCCTCTGCCATCAC | | |
| | | TTATCGTCGTCATCCTTG | | |
| | | TAATCCGTGCTCAGTCT | | |
| | | G | | |

TABLE 3L
FIGs. 47A-74D PEgRNA

| | | | | RT |
|---|---|---|---|---|
| | SPACER SEQUENCE | | PBS | TEMPLATE |
| | (SEQ ID NO: | 3′ EXTENSION SEQUENCE | LENGTH | LENGTH |
| PEGRNA | 3541-3547) | (SEQ ID NO: 3549-3556) | (NT) | (NT) |
| HEK3_ED4B_1TDEL | GGCCCAGACTGAGC | TCTGCCATCCGTGCTCAG | 13 | 9 |
| | ACGTGA | TCTG | | |
| HEK3_ED4B_1AINS | GGCCCAGACTGAGC | TCTGCCATCATCGTGCTC | 13 | 11 |
| | ACGTGA | AGTCTG | | |
| HEK3_ED4B_1CTTINS | GGCCCAGACTGAGC | TCTGCCATCAAAGCGTGC | 13 | 13 |
| | ACGTGA | TCAGTCTG | | |
| HEK3_ED4C_2GTOC | GGCCCAGACTGAGC | TCTGCCATGACGTGCTCA | 13 | 10 |
| | ACGTGA | GTCTG | | |
| HEK3_ED4D_1FLAGINS | GGCCCAGACTGAGC | TGGAGGAAGCAGGGCTT | 13 | 58 |
| | ACGTGA | CCTTTCCTCTGCCATCAC | | |
| | | TTATCGTCGTCATCCTTGT | | |
| | | AATCCGTGCTCAGTCTG | | |
| RNF2_ED4E_1CTOA | GTCATCTTAGTCATT | AACGAACACCTCATGTAA | 15 | 14 |
| | ACCTG | TGACTAAGATG | | |
| EMX1_ED4F_1GTOC | GAGTCCGAGCAGAA | ATGGGAGCCCTTGTTCTT | 13 | 13 |
| | GAAGAA | CTGCTCGG | | |
| HBB_ED4G_2TTOA | GTAACGGCAGACTT | ATCTGACTCCTGTGGAGA | 12 | 14 |
| | CTCCTC | AGTCTGCC | | |

TABLE 3M
FIGs. 48A-48C PEgRNA

| | | | | RT |
|---|---|---|---|---|
| | SPACER | | PBS | TEMPLATE |
| | SEQUENCE (SEQ | 3' EXTENSION SEQUENCE | LENGTH | LENGTH |
| PEGRNA | ID NO: 3557-3627) | (SEQ ID NO: 3628-3698) | (NT) | (NT) |
| VEGFA_ED5A_31 | GATGTCTGCAGGC | CCCTCTGACAATGTGCCATC | 13 | 31 |
| | CAGATGA | TGGAGCACTCATCTGGCCTG | | |
| | | CAGA | | |
| VEGFA_ED5A_30 | GATGTCTGCAGGC | CCTCTGACAATGTGCCATCT | 13 | 30 |
| | CAGATGA | GGAGCACTCATCTGGCCTGC | | |
| | | AGA | | |
| VEGFA_ED5A_29 | GATGTCTGCAGGC | CTCTGACAATGTGCCATCTG | 13 | 29 |
| | CAGATGA | GAGCACTCATCTGGCCTGCA | | |
| | | GA | | |
| VEGFA_ED5A_28 | GATGTCTGCAGGC | TCTGACAATGTGCCATCTGG | 13 | 28 |
| | CAGATGA | AGCACTCATCTGGCCTGCAG | | |
| | | A | | |
| VEGFA_ED5A_27 | GATGTCTGCAGGC | CTGACAATGTGCCATCTGGA | 13 | 27 |
| | CAGATGA | GCACTCATCTGGCCTGCAGA | | |
| VEGFA_ED5A_26 | GATGTCTGCAGGC | TGACAATGTGCCATCTGGAG | 13 | 26 |
| | CAGATGA | CACTCATCTGGCCTGCAGA | | |
| VEGFA_ED5A_25 | GATGTCTGCAGGC | GACAATGTGCCATCTGGAGC | 13 | 25 |
| | CAGATGA | ACTCATCTGGCCTGCAGA | | |
| VEGFA_ED5A_24 | GATGTCTGCAGGC | ACAATGTGCCATCTGGAGCA | 13 | 24 |
| | CAGATGA | CTCATCTGGCCTGCAGA | | |
| VEGFA_ED5A_23 | GATGTCTGCAGGC | CAATGTGCCATCTGGAGCAC | 13 | 23 |
| | CAGATGA | TCATCTGGCCTGCAGA | | |
| VEGFA_ED5A_22 | GATGTCTGCAGGC | AATGTGCCATCTGGAGCACT | 13 | 22 |
| | CAGATGA | CATCTGGCCTGCAGA | | |
| VEGFA_ED5A_21 | GATGTCTGCAGGC | ATGTGCCATCTGGAGCACTC | 13 | 21 |
| | CAGATGA | ATCTGGCCTGCAGA | | |
| VEGFA_ED5A_20 | GATGTCTGCAGGC | TGTGCCATCTGGAGCACTCA | 13 | 20 |
| | CAGATGA | TCTGGCCTGCAGA | | |
| VEGFA_ED5A_19 | GATGTCTGCAGGC | GTGCCATCTGGAGCACTCAT | 13 | 19 |
| | CAGATGA | CTGGCCTGCAGA | | |
| VEGFA_ED5A_18 | GATGTCTGCAGGC | TGCCATCTGGAGCACTCATC | 13 | 18 |
| | CAGATGA | TGGCCTGCAGA | | |
| VEGFA_ED5A_17 | GATGTCTGCAGGC | GCCATCTGGAGCACTCATCT | 13 | 17 |
| | CAGATGA | GGCCTGCAGA | | |
| VEGFA_ED5A_16 | GATGTCTGCAGGC | CCATCTGGAGCACTCATCTG | 13 | 16 |
| | CAGATGA | GCCTGCAGA | | |
| VEGFA_ED5A_15 | GATGTCTGCAGGC | CATCTGGAGCACTCATCTGG | 13 | 15 |
| | CAGATGA | CCTGCAGA | | |
| VEGFA_ED5A_14 | GATGTCTGCAGGC | ATCTGGAGCACTCATCTGGC | 13 | 14 |
| | CAGATGA | CTGCAGA | | |
| VEGFA_ED5A_13 | GATGTCTGCAGGC | TCTGGAGCACTCATCTGGCC | 13 | 13 |
| | CAGATGA | TGCAGA | | |
| VEGFA_ED5A_12 | GATGTCTGCAGGC | CTGGAGCACTCATCTGGCCT | 13 | 12 |
| | CAGATGA | GCAGA | | |
| VEGFA_ED5A_11 | GATGTCTGCAGGC | TGGAGCACTCATCTGGCCTG | 13 | 11 |
| | CAGATGA | CAGA | | |
| VEGFA_ED5A_10 | GATGTCTGCAGGC | GGAGCACTCATCTGGCCTGC | 13 | 10 |
| | CAGATGA | AGA | | |
| VEGFA_ED5A_9 | GATGTCTGCAGGC | GAGCACTCATCTGGCCTGCA | 13 | 9 |
| | CAGATGA | GA | | |
| VEGFA_ED5A_8 | GATGTCTGCAGGC | AGCACTCATCTGGCCTGCAG | 13 | 8 |
| | CAGATGA | A | | |
| DNMT1_ED5B_31 | GATTCCTGGTGCC | AGGACTAGTTCTGCCCTCCC | 13 | 31 |
| | AGAAACA | GTCACCACTGTTTCTGGCAC | | |
| | | CAGG | | |
| DNMT1_ED5B_30 | GATTCCTGGTGCC | GGACTAGTTCTGCCCTCCCG | 13 | 30 |
| | AGAAACA | TCACCACTGTTTCTGGCACC | | |
| | | AGG | | |
| DNMT1_ED5B_29 | GATTCCTGGTGCC | GACTAGTTCTGCCCTCCCGT | 13 | 29 |
| | AGAAACA | CACCACTGTTTCTGGCACCA | | |
| | | GG | | |
| DNMT1_ED5B_28 | GATTCCTGGTGCC | ACTAGTTCTGCCCTCCCGTC | 13 | 28 |
| | AGAAACA | ACCACTGTTTCTGGCACCAG | | |
| | | G | | |
| DNMT1_ED5B_27 | GATTCCTGGTGCC | CTAGTTCTGCCCTCCCGTCA | 13 | 27 |
| | AGAAACA | CCACTGTTTCTGGCACCAGG | | |
| DNMT1_ED5B_26 | GATTCCTGGTGCC | TAGTTCTGCCCTCCCGTCAC | 13 | 26 |
| | AGAAACA | CACTGTTTCTGGCACCAGG | | |
| DNMT1_ED5B_25 | GATTCCTGGTGCC | AGTTCTGCCCTCCCGTCACC | 13 | 25 |
| | AGAAACA | ACTGTTTCTGGCACCAGG | | |
| DNMT1_ED5B_24 | GATTCCTGGTGCC | GTTCTGCCCTCCCGTCACCA | 13 | 24 |
| | AGAAACA | CTGTTTCTGGCACCAGG | | |
| DNMT1_ED5B_23 | GATTCCTGGTGCC | TTCTGCCCTCCCGTCACCAC | 13 | 23 |
| | AGAAACA | TGTTTCTGGCACCAGG | | |
| DNMT1_ED5B_22 | GATTCCTGGTGCC | TCTGCCCTCCCGTCACCACT | 13 | 22 |
| | AGAAACA | GTTTCTGGCACCAGG | | |
| DNMT1_ED5B_21 | GATTCCTGGTGCC | CTGCCCTCCCGTCACCACTG | 13 | 21 |
| | AGAAACA | TTTCTGGCACCAGG | | |
| DNMT1_ED5B_20 | GATTCCTGGTGCC | TGCCCTCCCGTCACCACTGT | 13 | 20 |
| | AGAAACA | TTCTGGCACCAGG | | |
| DNMT1_ED5B_19 | GATTCCTGGTGCC | GCCCTCCCGTCACCACTGTT | 13 | 19 |
| | AGAAACA | TCTGGCACCAGG | | |
| DNMT1_ED5B_18 | GATTCCTGGTGCC | CCCTCCCGTCACCACTGTTT | 13 | 18 |
| | AGAAACA | CTGGCACCAGG | | |
| DNMT1_ED5B_17 | GATTCCTGGTGCC | CCTCCCGTCACCACTGTTTC | 13 | 17 |
| | AGAAACA | TGGCACCAGG | | |
| DNMT1_ED5B_16 | GATTCCTGGTGCC | CTCCCGTCACCACTGTTTCT | 13 | 16 |
| | AGAAACA | GGCACCAGG | | |
| DNMT1_ED5B_15 | GATTCCTGGTGCC | TCCCGTCACCACTGTTTCTG | 13 | 15 |
| | AGAAACA | GCACCAGG | | |
| DNMT1_ED5B_14 | GATTCCTGGTGCC | CCCGTCACCACTGTTTCTGG | 13 | 14 |
| | AGAAACA | CACCAGG | | |
| DNMT1_ED5B_13 | GATTCCTGGTGCC | CCGTCACCACTGTTTCTGGC | 13 | 13 |
| | AGAAACA | ACCAGG | | |
| DNMT1_ED5B_12 | GATTCCTGGTGCC | CGTCACCACTGTTTCTGGCA | 13 | 12 |
| | AGAAACA | CCAGG | | |
| DNMT1_ED5B_11 | GATTCCTGGTGCC | GTCACCACTGTTTCTGGCAC | 13 | 11 |
| | AGAAACA | CAGG | | |
| DNMT1_ED5B_10 | GATTCCTGGTGCC | TCACCACTGTTTCTGGCACC | 13 | 10 |
| | AGAAACA | AGG | | |
| DNMT1_ED5B_9 | GATTCCTGGTGCC | CACCACTGTTTCTGGCACCA | 13 | 9 |
| | AGAAACA | GG | | |
| DNMT1_ED5B_8 | GATTCCTGGTGCC | ACCACTGTTTCTGGCACCAG | 13 | 8 |
| | AGAAACA | G | | |
| RUNX1_ED5C_31 | GCATTTTCAGGAG | AATGACTCAAATATGCTGTC | 15 | 31 |
| | GAAGCGA | TGAAGCAATCGCTTCCTCCT | | |
| | | GAAAAT | | |
| RUNX1_ED5C_30 | GCATTTTCAGGAG | ATGACTCAAATATGCTGTCT | 15 | 30 |
| | GAAGCGA | GAAGCAATCGCTTCCTCCTG | | |
| | | AAAAT | | |
| RUNX1_ED5C_29 | GCATTTTCAGGAG | TGACTCAAATATGCTGTCTG | 15 | 29 |
| | GAAGCGA | AAGCAATCGCTTCCTCCTGA | | |
| | | AAAT | | |
| RUNX1_ED5C_28 | GCATTTTCAGGAG | GACTCAAATATGCTGTCTGA | 15 | 28 |
| | GAAGCGA | AGCAATCGCTTCCTCCTGAA | | |
| | | AAT | | |
| RUNX1_ED5C_27 | GCATTTTCAGGAG | ACTCAAATATGCTGTCTGAA | 15 | 27 |
| | GAAGCGA | GCAATCGCTTCCTCCTGAAA | | |
| | | AT | | |
| RUNX1_ED5C_26 | GCATTTTCAGGAG | CTCAAATATGCTGTCTGAAG | 15 | 26 |
| | GAAGCGA | CAATCGCTTCCTCCTGAAAA | | |
| | | T | | |
| RUNX1_ED5C_25 | GCATTTTCAGGAG | TCAAATATGCTGTCTGAAGC | 15 | 25 |
| | GAAGCGA | AATCGCTTCCTCCTGAAAAT | | |
| RUNX1_ED5C_24 | GCATTTTCAGGAG | CAAATATGCTGTCTGAAGCA | 15 | 24 |
| | GAAGCGA | ATCGCTTCCTCCTGAAAAT | | |
| RUNX1_ED5C_23 | GCATTTTCAGGAG | AAATATGCTGTCTGAAGCAA | 15 | 23 |
| | GAAGCGA | TCGCTTCCTCCTGAAAAT | | |
| RUNX1_ED5C_22 | GCATTTTCAGGAG | AATATGCTGTCTGAAGCAAT | 15 | 22 |
| | GAAGCGA | CGCTTCCTCCTGAAAAT | | |
| RUNX1_ED5C_21 | GCATTTTCAGGAG | ATATGCTGTCTGAAGCAATC | 15 | 21 |
| | GAAGCGA | GCTTCCTCCTGAAAAT | | |
| RUNX1_ED5C_20 | GCATTTTCAGGAG | TATGCTGTCTGAAGCAATCG | 15 | 20 |
| | GAAGCGA | CTTCCTCCTGAAAAT | | |
| RUNX1_ED5C_19 | GCATTTTCAGGAG | ATGCTGTCTGAAGCAATCGC | 15 | 19 |
| | GAAGCGA | TTCCTCCTGAAAAT | | |
| RUNX1_ED5C_18 | GCATTTTCAGGAG | TGCTGTCTGAAGCAATCGCT | 15 | 18 |
| | GAAGCGA | TCCTCCTGAAAAT | | |
| RUNX1_ED5C_17 | GCATTTTCAGGAG | GCTGTCTGAAGCAATCGCTT | 15 | 17 |
| | GAAGCGA | CCTCCTGAAAAT | | |
| RUNX1_ED5C_16 | GCATTTTCAGGAG | CTGTCTGAAGCAATCGCTTC | 15 | 16 |
| | GAAGCGA | CTCCTGAAAAT | | |
| RUNX1_ED5C_15 | GCATTTTCAGGAG | TGTCTGAAGCAATCGCTTCC | 15 | 15 |
| | GAAGCGA | TCCTGAAAAT | | |
| RUNX1_ED5C_14 | GCATTTTCAGGAG | GTCTGAAGCAATCGCTTCCT | 15 | 14 |
| | GAAGCGA | CCTGAAAAT | | |
| RUNX1_ED5C_13 | GCATTTTCAGGAG | TCTGAAGCAATCGCTTCCTC | 15 | 13 |
| | GAAGCGA | CTGAAAAT | | |
| RUNX1_ED5C_12 | GCATTTTCAGGAG | CTGAAGCAATCGCTTCCTCC | 15 | 12 |
| | GAAGCGA | TGAAAAT | | |
| RUNX1_ED5C_11 | GCATTTTCAGGAG | TGAAGCAATCGCTTCCTCCT | 15 | 11 |
| | GAAGCGA | GAAAAT | | |
| RUNX1_ED5C_10 | GCATTTTCAGGAG | GAAGCAATCGCTTCCTCCTG | 15 | 10 |
| | GAAGCGA | AAAAT | | |
| RUNX1_ED5C_9 | GCATTTTCAGGAG | AAGCAATCGCTTCCTCCTGA | 15 | 9 |
| | GAAGCGA | AAAT | | |

TABLE 3N
FIGs. 48A-48C PEgRNA

| | | | | RT |
|---|---|---|---|---|
| | | | PBS | TEMPLATE |
| | | 3′ EXTENSION | LENGTH | LENGTH |
| PEGRNA | SPACER SEQUENCE | SEQUENCE | (NT) | (NT) |
| HEK3_ED6_5GTOA | GGCCCAGACTGAGC | TCTGCTATCACGTGCT | 13 | 10 |
| | ACGTGA (SEQ ID | CAGTCTG (SEQ ID NO: | | |
| | NO: 393) | 394) | | |

TABLE 3O
FIGs. 48A-48C nicking sgRNA

| NICKING | |
|---|---|
| SGRNA | SPACER SEQUENCE |
| HEK3_ED6_+63 | GCACATACTAGCCCCTGTCT (SEQ |
| | ID NO: 395) |

TABLE 3P
FIGs. 50A-50B PEgRNA

| | | | | RT |
|---|---|---|---|---|
| | | | PBS | TEMPLATE |
| | SPACER (SEQ ID | 3′ EXTENSION (5′ TO 3′) | LENGTH | LENGTH |
| PEGRNA | NO: 3699-3754) | (SEQ ID NO: 3755-3810) | (NT) | (NT) |
| HBB | GTAACGGCAGAC | AGACTTCTCCTCAGGAGTCAGGT | 12 | 14 |
| 3.5 | TTCTCCAC | GCAC | | |
| HBB | GCATGGTGCACCT | AGACTTCTCTTCAGGAGTCAGGT | 13 | 14 |
| 3.7 | GACTCCTG | GCAC | | |
| HBB | GCATGGTGCACCT | TAACGGCAGACTTCTCCTCAGGA | 13 | 19 |
| 5.2 | GACTCCTG | GTCAGGTGCAC | | |
| HBB | GCATGGTGCACCT | ACGGCAGACTTCTCCTCAGGAGT | 13 | 17 |
| 5.3 | GACTCCTG | CAGGTGCAC | | |
| HBB | GCATGGTGCACCT | GGCAGACTTCTCCTCAGGAGTCA | 13 | 16 |
| 5.4 | GACTCCTG | GGTGCAC | | |
| HBB | GCATGGTGCACCT | GCAGACTTCTCCTCAGGAGTCAG | 13 | 13 |
| 5.5 | GACTCCTG | GTGCAC | | |
| HBB | GCATGGTGCACCT | GACTTCTCCTCAGGAGTCAGGTG | 13 | 12 |
| 5.6 | GACTCCTG | CAC | | |
| HBB | GCATGGTGCACCT | ACTTCTCCTCAGGAGTCAGGTGC | 13 | 21 |
| 5.7 | GACTCCTG | AC | | |
| HBB | GCATGGTGCACCT | TAACGGCAGACTTCTCCTCAGGA | 12 | 19 |
| 5.8 | GACTCCTG | GTCAGGTGCA | | |
| HBB | GCATGGTGCACCT | ACGGCAGACTTCTCCTCAGGAGT | 12 | 17 |
| 5.9 | GACTCCTG | CAGGTGCA | | |
| HBB | GCATGGTGCACCT | GGCAGACTTCTCCTCAGGAGTCA | 12 | 16 |
| 5.10 | GACTCCTG | GGTGCA | | |
| HBB | GCATGGTGCACCT | GCAGACTTCTCCTCAGGAGTCAG | 12 | 13 |
| 5.11 | GACTCCTG | GTGCA | | |
| HBB | GCATGGTGCACCT | GACTTCTCCTCAGGAGTCAGGTG | 12 | 12 |
| 5.12 | GACTCCTG | CA | | |
| HBB | GCATGGTGCACCT | ACTTCTCCTCAGGAGTCAGGTGC | 12 | 14 |
| 5.13 | GACTCCTG | A | | |
| HEXAS | ATCCTTCCAGTCA | ATATCTTATGGCCCTGACTGGAA | 13 | 14 |
| 1 | GGGCCAT | | | |
| HEXAS | ATCCTTCCAGTCA | TATATCTTATGGCCCTGACTGGAA | 13 | 15 |
| 2 | GGGCCAT | | | |
| HEXAS | ATCCTTCCAGTCA | GTATATCTTATGGCCCTGACTGGA | 13 | 16 |
| 3 | GGGCCAT | A | | |
| HEXAS | ATCCTTCCAGTCA | ACCGTATATCTTATGGCCCTGACT | 13 | 19 |
| 4 | GGGCCAT | GGAA | | |
| HEXAS | ATCCTTCCAGTCA | AACCGTATATCTTATGGCCCTGAC | 13 | 20 |
| 5 | GGGCCAT | TGGAA | | |
| HEXAS | ATCCTTCCAGTCA | GAACCGTATATCTTATGGCCCTGA | 13 | 21 |
| 6 | GGGCCAT | CTGGAA | | |
| HEXAS | ATCCTTCCAGTCA | TGAACCGTATATCTTATGGCCCTG | 13 | 22 |
| 7 | GGGCCAT | ACTGGAA | | |
| HEXAS | ATCCTTCCAGTCA | ATATCTTATGGCCCTGACT | 9 | 14 |
| 8 | GGGCCAT | | | |
| HEXAS | ATCCTTCCAGTCA | TATATCTTATGGCCCTGACT | 9 | 15 |
| 9 | GGGCCAT | | | |
| HEXAS | ATCCTTCCAGTCA | GTATATCTTATGGCCCTGACT | 9 | 16 |
| 10 | GGGCCAT | | | |
| HEXAS | ATCCTTCCAGTCA | ACCGTATATCTTATGGCCCTGACT | 9 | 19 |
| 11 | GGGCCAT | | | |
| HEXAS | ATCCTTCCAGTCA | AACCGTATATCTTATGGCCCTGAC | 9 | 20 |
| 12 | GGGCCAT | T | | |
| HEXAS | ATCCTTCCAGTCA | GAACCGTATATCTTATGGCCCTGA | 9 | 21 |
| 13 | GGGCCAT | CT | | |
| HEXAS | ATCCTTCCAGTCA | TGAACCGTATATCTTATGGCCCTG | 9 | 22 |
| 14 | GGGCCAT | ACT | | |
| HEXAS | ATCCTTCCAGTCA | TGAACCGTATATCTTATGGCCCTG | 8 | 22 |
| 15 | GGGCCAT | AC | | |
| HEXAS | ATCCTTCCAGTCA | TGAACCGTATATCTTATGGCCCTG | 10 | 22 |
| 16 | GGGCCAT | ACTG | | |
| HEXAS | ATCCTTCCAGTCA | TGAACCGTATATCTTATGGCCCTG | 11 | 22 |
| 17 | GGGCCAT | ACTGG | | |
| HEXAS | ATCCTTCCAGTCA | TGAACCGTATATCTTATGGCCCTG | 12 | 22 |
| 18 | GGGCCAT | ACTGGA | | |
| HEXAS | ATCCTTCCAGTCA | TGAACCGTATATCTTATGGCCCTG | 13 | 22 |
| 19 | GGGCCAT | ACTGGAA | | |
| HEXAS | ATCCTTCCAGTCA | TGAACCGTATATCTTATGGCCCTG | 14 | 22 |
| 20 | GGGCCAT | ACTGGAAG | | |
| HEXAS | ATCCTTCCAGTCA | TGAACCGTATATCTTATGGCCCTG | 15 | 22 |
| 21 | GGGCCAT | ACTGGAAGG | | |
| HEXAS | ATCCTTCCAGTCA | ACCTGAACCGTATATCTTATGGCC | 9 | 25 |
| 22 | GGGCCAT | CTGACT | | |
| HEXAS | ATCCTTCCAGTCA | TACCTGAACCGTATATCTTATGGC | 9 | 26 |
| 23 | GGGCCAT | CCTGACT | | |
| HEXAS | ATCCTTCCAGTCA | GTACCTGAACCGTATATCTTATGG | 9 | 27 |
| 24 | GGGCCAT | CCCTGACT | | |
| HEXAS | ATCCTTCCAGTCA | GGTACCTGAACCGTATATCTTATG | 9 | 28 |
| 25 | GGGCCAT | GCCCTGACT | | |
| HEXAS | ATCCTTCCAGTCA | TGGTACCTGAACCGTATATCTTAT | 9 | 29 |
| 26 | GGGCCAT | GGCCCTGACT | | |
| HEXA | ATCCTTCCAGTCA | ACCTGAACCGTATATCCTATGGCC | 13 | 21 |
| 5 | GGGCCAT | CTGACTGGAA | | |
| HEXA | ATCCTTCCAGTCA | ACCGTATATCCTATGGCCCTGACT | 13 | 15 |
| 6 | GGGCCAT | GGAA | | |
| HEXA | ATCCTTCCAGTCA | ACCTGAACCGTATATCCTATGGCC | 15 | 21 |
| 7 | GGGCCAT | CTGACTGGAAGG | | |
| HEXA | ATCCTTCCAGTCA | ACCTGAACCGTATATCCTATGGCC | 14 | 21 |
| 8 | GGGCCAT | CTGACTGGAAG | | |
| HEXA | ATCCTTCCAGTCA | ACCTGAACCGTATATCCTATGGCC | 12 | 21 |
| 9 | GGGCCAT | CTGACTGGA | | |
| HEXA | ATCCTTCCAGTCA | ACCTGAACCGTATATCCTATGGCC | 11 | 21 |
| 10 | GGGCCAT | CTGACTGG | | |
| HEXA | ATCCTTCCAGTCA | ACCTGAACCGTATATCCTATGGCC | 10 | 21 |
| 11 | GGGCCAT | CTGACTG | | |
| HEXA | ATCCTTCCAGTCA | AACCGTATATCCTATGGCCCTGAC | 13 | 16 |
| 12 | GGGCCAT | TGGAA | | |
| HEXA | ATCCTTCCAGTCA | TGAACCGTATATCCTATGGCCCTG | 13 | 18 |
| 13 | GGGCCAT | ACTGGAA | | |
| HEXA | ATCCTTCCAGTCA | TACCTGAACCGTATATCCTATGGC | 13 | 22 |
| 14 | GGGCCAT | CCTGACTGGAA | | |
| HEXA | ATCCTTCCAGTCA | TGGTACCTGAACCGTATATCCTAT | 13 | 25 |
| 15 | GGGCCAT | GGCCCTGACTGGAA | | |
| HEXA | ATCCTTCCAGTCA | GTACCTGAACCGTATATCCTATGG | 13 | 23 |
| 16 | GGGCCAT | CCCTGACTGGAA | | |
| HEXA | ATCCTTCCAGTCA | AACCGTATATCCTATGGCCCTGAC | 10 | 16 |
| 17 | GGGCCAT | TG | | |
| HEXA | ATCCTTCCAGTCA | TGAACCGTATATCCTATGGCCCTG | 10 | 18 |
| 18 | GGGCCAT | ACTG | | |
| HEXA | ATCCTTCCAGTCA | TACCTGAACCGTATATCCTATGGC | 10 | 22 |
| 19 | GGGCCAT | CCTGACTG | | |
| HEXA | ATCCTTCCAGTCA | TGGTACCTGAACCGTATATCCTAT | 10 | 25 |
| 20 | GGGCCAT | GGCCCTGACTG | | |

TABLE 3Q
FIGs. 50A-50B nicking sgRNA

| NICKING SGRNA | SPACER SEQUENCE |
|---|---|
| HBB_ED7A_+72 | GCCTTGATACCAACCTGCCCA |
| | (SEQ ID NO: 626) |
| HEXA_ED7B_+60 | GCTGGAACTGGTCACCAAGGC |
| | (SEQ ID NO: 627) |
| HEXA_ED7B_CORRECT_WT_PE3B | GTACCTGAACCGTATATCCTA |
| | (SEQ ID NO: 628) |
| HEXA_ED7B_CORRECT_SILENT_PE3B | GTACCTGAACCGTATATCTTA |
| | (SEQ ID NO: 629) |

TABLE 3R
FIGs. 51A-51G PEgRNA

| | | | | RT |
|---|---|---|---|---|
| | | | PBS | TEMPLATE |
| | SPACER SEQUENCE | 3' EXTENSION (SEQ | LENGTH | LENGTH |
| PEGRNA | (SEQ ID NO: 632-640) | ID NO: 641-649) | (NT) | (NT) |
| HEK3_ED8_1TTOG | GGCCCAGACTGAGC | TCTGCCATCCCGTGCTCA | 13 | 10 |
| | ACGTGA | GTCTG | | |
| HEK3_ED8_3ATOC | GGCCCAGACTGAGC | TCTGCCAGCACGTGCTCA | 13 | 10 |
| | ACGTGA | GTCTG | | |
| HEK3_ED8_3ATOT | GGCCCAGACTGAGC | TCTGCCAACACGTGCTCA | 13 | 10 |
| | ACGTGA | GTCTG | | |
| HEK3_ED8_3 | GGCCCAGACTGAGC | TGGAGGAAGCAGGGCTTC | 13 | 34 |
| ATOT_5- | ACGTGA | CTTTCCTCTGAAAACACG | | |
| 6GGTOTT | | TGCTCAGTCTG | | |
| HEK3_ED8_1CTTINS | GGCCCAGACTGAGC | TCTGCCATCAAAGCGTGC | 13 | 10 |
| | ACGTGA | TCAGTCTG | | |
| RNF2_ED8_1CTOA | GTCATCTTAGTCATT | AACGAACACCTCATGTAA | 15 | 14 |
| | ACCTG | TGACTAAGATG | | |
| RNF2_ED8_1CTOG | GTCATCTTAGTCATT | AACGAACACCTCACGTAA | 15 | 14 |
| | ACCTG | TGACTAAGATG | | |
| RNF2_ED8_1GTAINS | GTCATCTTAGTCATT | AACGAACACCTCAGTACG | 15 | 17 |
| | ACCTG | TAATGACTAAGATG | | |
| HBB_ED8_4ATOT | GCATGGTGCACCTG | AGACTTCTCCACAGGAGT | 13 | 14 |
| | ACTCCTG | CAGGTGCAC | | |

TABLE 4
Sequences of primers used for mammalian cell genomic
DNA amplification and HTS¹⁸¹.

| DESCRIPTION | SEQUENCE (SEQ ID NOS: 3811-3863) |
|---|---|
| HEK3 FWD | ACACTCTTTCCCTACACGACGCTCTTCCGATCTNNNNATGTG |
| | GGCTGCCTAGAAAGG |
| HEK3 REV | TGGAGTTCAGACGTGTGCTCTTCCGATCTCCCAGCCAAACTT |
| | GTCAACC |
| RNF2 FWD | ACACTCTTTCCCTACACGACGCTCTTCCGATCTNNNNACGTC |
| | TCATATGCCCCTTGG |
| RNF2 REV | TGGAGTTCAGACGTGTGCTCTTCCGATCTACGTAGGAATTTT |
| | GGTGGGACA |
| HEK4 FWD | ACACTCTTTCCCTACACGACGCTCTTCCGATCTNNNNGAACC |
| | CAGGTAGCCAGAGAC |
| HEK4 REV | TGGAGTTCAGACGTGTGCTCTTCCGATCTTCCTTTCAACCCG |
| | AACGGAG |
| EMX1 FWD | ACACTCTTTCCCTACACGACGCTCTTCCGATCTNNNNCAGCT |
| | CAGCCTGAGTGTTGA |
| EMX1 REV | TGGAGTTCAGACGTGTGCTCTTCCGATCTCTCGTGGGTTTGT |
| | GGTTGC |
| FANCF FWD | ACACTCTTTCCCTACACGACGCTCTTCCGATCTNNNNCATTG |
| | CAGAGAGGCGTATCA |
| FANCF REV | TGGAGTTCAGACGTGTGCTCTTCCGATCTGGGGTCCCAGGT |
| | GCTGAC |
| HBB FWD | ACACTCTTTCCCTACACGACGCTCTTCCGATCTNNNNAGGGT |
| | TGGCCAATCTACTCCC |
| HBB REV | TGGAGTTCAGACGTGTGCTCTTCCGATCTGTCTTCTCTGTCT |
| | CCACATGCC |
| PRNP FWD | ACACTCTTTCCCTACACGACGCTCTTCCGATCTNNNNGTCAG |
| | TGGAACAAGCCGAGT |
| PRNP REV | TGGAGTTCAGACGTGTGCTCTTCCGATCTACTTGGTTGGGGT |
| | AACGGTG |
| HEXA FWD | ACACTCTTTCCCTACACGACGCTCTTCCGATCTNNNNCATAC |
| | AGGTGTGGCGAGAGG |
| HEXA REV | TGGAGTTCAGACGTGTGCTCTTCCGATCTCCAGCCTCCTTTG |
| | GTTAGCA |
| RUNX1 FWD | ACACTCTTTCCCTACACGACGCTCTTCCGATCTNNNNTCACA |
| | AACAAGACAGGGAACTG |
| RUNX1 REV | TGGAGTTCAGACGTGTGCTCTTCCGATCTAGATGTAGGGCTA |
| | GAGGGGTG |
| VEGFA FWD | ACACTCTTTCCCTACACGACGCTCTTCCGATCTNNNNACTTG |
| | GTGCCAAATTCTTCTCC |
| VEGFA REV | TGGAGTTCAGACGTGTGCTCTTCCGATCTAAAGAGGGAATG |
| | GGCTTTGGA |
| DNMT FWD | ACACTCTTTCCCTACACGACGCTCTTCCGATCTNNNNCACAA |
| | CAGCTTCATGTCAGCC |
| DNMT REV | TGGAGTTCAGACGTGTGCTCTTCCGATCTACGTTAATGTTTC |
| | CTGATGGTCC |
| HEK3 OFF-TARGET | ACACTCTTTCCCTACACGACGCTCTTCCGATCTNNNNTCCCC |
| SITE 1 FWD | TGTTGACCTGGAGAA |
| HEK3 OFF-TARGET | TGGAGTTCAGACGTGTGCTCTTCCGATCTCACTGTACTTGCC |
| SITE 1 REV | CTGACCA |
| HEK3 OFF-TARGET | ACACTCTTTCCCTACACGACGCTCTTCCGATCTNNNNTTGGT |
| SITE 2 FWD | GTTGACAGGGAGCAA |
| HEK3 OFF-TARGET | TGGAGTTCAGACGTGTGCTCTTCCGATCTCTGAGATGTGGGC |
| SITE 2 REV | AGAAGGG |
| HEK3 OFF-TARGET | ACACTCTTTCCCTACACGACGCTCTTCCGATCTNNNNTGAGA |
| SITE 3 FWD | GGGAACAGAAGGGCT |
| HEK3 OFF-TARGET | TGGAGTTCAGACGTGTGCTCTTCCGATCTGTCCAAAGGCCC |
| SITE 3 REV | AAGAACCT |
| HEK3 OFF-TARGET | ACACTCTTTCCCTACACGACGCTCTTCCGATCTNNNNTCCTA |
| SITE 4 FWD | GCACTTTGGAAGGTCG |
| HEK3 OFF-TARGET | TGGAGTTCAGACGTGTGCTCTTCCGATCTGCTCATCTTAATCT |
| SITE 4 REV | GCTCAGCC |
| HEK4 OFF-TARGET | ACACTCTTTCCCTACACGACGCTCTTCCGATCTNNNNGGCAT |
| SITE 1 FWD | GGCTTCTGAGACTCA |
| HEK4 OFF-TARGET | TGGAGTTCAGACGTGTGCTCTTCCGATCTGTCTCCCTTGCAC |
| SITE 1 REV | TCCCTGTCTTT |
| HEK4 OFF-TARGET | ACACTCTTTCCCTACACGACGCTCTTCCGATCTNNNNTTTGG |
| SITE 2 FWD | CAATGGAGGCATTGG |
| HEK4 OFF-TARGET | TGGAGTTCAGACGTGTGCTCTTCCGATCTGAAGAGGCTGCC |
| SITE 2 REV | CATGAGAG |
| HEK4 OFF-TARGET | ACACTCTTTCCCTACACGACGCTCTTCCGATCTNNNNGGTCT |
| SITE 3 FWD | GAGGCTCGAATCCTG |
| HEK4 OFF-TARGET | TGGAGTTCAGACGTGTGCTCTTCCGATCTCTGTGGCCTCCAT |
| SITE 3 REV | ATCCCTG |
| HEK4 OFF-TARGET | ACACTCTTTCCCTACACGACGCTCTTCCGATCTNNNNTTTCC |
| SITE 4 FWD | ACCAGAACTCAGCCC |
| HEK4 OFF-TARGET | TGGAGTTCAGACGTGTGCTCTTCCGATCTCCTCGGTTCCTCC |
| SITE 4 REV | ACAACAC |
| EMX1 OFF- | ACACTCTTTCCCTACACGACGCTCTTCCGATCTNNNNGTGGG |
| TARGET SITE 1 | GAGATTTGCATCTGTGGAGG |
| FWD | |
| EMX1 OFF- | TGGAGTTCAGACGTGTGCTCTTCCGATCTGCTTTTATACCATC |
| TARGET SITE 1 | TTGGGGTTACAG |
| REV | |
| EMX1 OFF- | ACACTCTTTCCCTACACGACGCTCTTCCGATCTNNNNCAATG |
| TARGET SITE 2 | TGCTTCAACCCATCACGGC |
| FWD | |
| EMX1 OFF- | TGGAGTTCAGACGTGTGCTCTTCCGATCTCCATGAATTTGTG |
| TARGET SITE 2 | ATGGATGCAGTCTG |
| REV | |
| EMX1 OFF- | ACACTCTTTCCCTACACGACGCTCTTCCGATCTNNNNGAGAA |
| TARGET SITE 3 | GGAGGTGCAGGAGCTAGAC |
| FWD | |
| EMX1 OFF- | TGGAGTTCAGACGTGTGCTCTTCCGATCTCATCCCGACCTTC |
| TARGET SITE 3 | ATCCCTCCTGG |
| REV | |
| EMX1 OFF- | ACACTCTTTCCCTACACGACGCTCTTCCGATCTNNNNGTAGT |
| TARGET SITE 4 | TCTGACATTCCTCCTGAGGG |
| FWD | |
| EMX1 OFF- | TGGAGTTCAGACGTGTGCTCTTCCGATCTTCAAACAAGGTG |
| TARGET SITE 4 | CAGATACAGCA |
| REV | |
| FANCF OFF- | ACACTCTTTCCCTACACGACGCTCTTCCGATCTNNNNGCGGG |
| TARGET SITE 1 | CAGTGGCGTCTTAGTCG |
| FWD | |
| FANCF OFF- | TGGAGTTCAGACGTGTGCTCTTCCGATCTCCCTGGGTTTGGT |
| TARGET SITE 1 | TGGCTGCTC |
| REV | |
| FANCF OFF- | ACACTCTTTCCCTACACGACGCTCTTCCGATCTNNNNCTCCT |
| TARGET SITE 2 | TGCCGCCCAGCCGGTC |
| FWD | |
| FANCF OFF- | TGGAGTTCAGACGTGTGCTCTTCCGATCTCACTGGGGAAGA |
| TARGET SITE 2 | GGCGAGGACAC |
| REV | |
| FANCF OFF- | ACACTCTTTCCCTACACGACGCTCTTCCGATCTNNNNCCAGT |
| TARGET SITE 3 | GTTTCCCATCCCCAACAC |
| FWD | |
| FANCF OFF- | TGGAGTTCAGACGTGTGCTCTTCCGATCTGAATGGATCCCCC |
| TARGET SITE 3 | CCTAGAGCTC |
| REV | |
| FANCF OFF- | ACACTCTTTCCCTACACGACGCTCTTCCGATCTNNNNCAGGC |
| TARGET SITE 4 | CCACAGGTCCTTCTGGA |
| FWD | |

TABLE 5
Sequences of 100-mer single-stranded DNA oligonucleotide donor
templates used in HDR experiments and in the creation of the HBB
E6V HEK293T cell line. Oligonucleotides are 100-103 nt in length with
homology arms centered around the site of the edit. Oligonucleotides
were from Integrated DNA Technologies, purified by PAGE.

| | |
|---|---|
| HEK3 + 3 A TO T | GCTTCTCCAGCCCTGGCCTGGGTCAATCCTTGGGGCCCAG |
| | ACTGAGCACGTGTTGGCAGAGGAAAGGAAGCCCTGCTTC |
| | CTCCAGAGGGCGTCGCAGGAC (SEQ ID NO: 717) |
| HEK3 + 3 A TO T, +5, 6 | GCTTCTCCAGCCCTGGCCTGGGTCAATCCTTGGGGCCCAG |
| GG TO TT | ACTGAGCACGTGTTTTCAGAGGAAAGGAAGCCCTGCTTC |
| | CTCCAGAGGGCGTCGCAGGAC (SEQ ID NO: 718) |
| HEK3 + 1 T TO G | GCTTCTCCAGCCCTGGCCTGGGTCAATCCTTGGGGCCCAG |
| | ACTGAGCACGGGATGGCAGAGGAAAGGAAGCCCTGCTTC |
| | CTCCAGAGGGCGTCGCAGGAC (SEQ ID NO: 719) |
| HEK3 + 3 A TO C | GCTTCTCCAGCCCTGGCCTGGGTCAATCCTTGGGGCCCAG |
| | ACTGAGCACGTGCTGGCAGAGGAAAGGAAGCCCTGCTTC |
| | CTCCAGAGGGCGTCGCAGGAC (SEQ ID NO: 720) |
| HEK3 + 1 CTT | GCTTCTCCAGCCCTGGCCTGGGTCAATCCTTGGGGCCCAG |
| INSERTION | ACTGAGCACGCTTTGATGGCAGAGGAAAGGAAGCCCTGC |
| | TTCCTCCAGAGGGCGTCGCAGGAC (SEQ ID NO: 721) |
| RNF2 + 1 C TO A | CCCAGTTTACACGTCTCATATGCCCCTTGGCAGTCATCTTA |
| | GTCATTACATGAGGTGTTCGTTGTAACTCATATAAACTGAG |
| | TTCCCATGTTTTGCTTAA (SEQ ID NO: 722) |
| RNF2 + 1 C TO G | CCCAGTTTACACGTCTCATATGCCCCTTGGCAGTCATCTTA |
| | GTCATTACGTGAGGTGTTCGTTGTAACTCATATAAACTGAG |
| | TTCCCATGTTTTGCTTAA (SEQ ID NO: 723) |
| RNF2 + 1 GTA | CAGTTTACACGTCTCATATGCCCCTTGGCAGTCATCTTAGT |
| INSERTION | CATTACGTACTGAGGTGTTCGTTGTAACTCATATAAACTGA |
| | GTTCCCATGTTTTGCTTA (SEQ ID NO: 724) |
| HBB E6V | ACTTCATCCACGTTCACCTTGCCCCACAGGGCAGTAACGG |
| INSTALLATION (ALSO | CAGACTTCTCCACAGGAGTCAGATGCACCATGGTGTCTGT |
| USED FOR CREATION | TTGAGGTTGCTAGTGAACAC (SEQ ID NO: 725) |
| OF THE HBB E6V | |
| HEK293T CELL LINE) | |
| HBB E6V | ACTTCATCCACGTTCACCTTGCCCCACAGGGCAGTAACGG |
| CORRECTION | CAGACTTCTCCTCAGGAGTCAGGTGCACCATGGTGTCTGT |
| PROTOSPACER A | TTGAGGTTGCTAGTGAACAC (SEQ ID NO: 726) |
| HBB E6V | GTGTTCACTAGCAACCTCAAACAGACACCATGGTGCACCT |
| CORRECTION | GACTCCTGAGGAGAAGTCTGCCGTTACTGCCCTGTGGGGC |
| PROTOSPACER B | AAGGTGAACGTGGATGAAGT (SEQ ID NO: 727) |
| HBB E6V | GTGTTCACTAGCAACCTCAAACAGACACCATGGTGCACCT |
| CORRECTION | GACTCCTGATGAGAAGTCTGCCGTTACTGCCCTGTGGGGC |
| PROTOSPACER B, | AAGGTGAACGTGGATGAAGT (SEQ ID NO: 728) |
| SILENT PAM | |
| MUTATION | |
| PRNP G127V | CACATGGCTGGTGCTGCAGCAGCTGGGGCAGTGGTGGGG |
| | GGCCTTGGCGTCTACATGCTGGGAAGTGCCATGAGCAGGC |
| | CCATCATACATTTCGGCAGTG (SEQ ID NO: 729) |

[1425] Additional Sequences

[1426] Sequences of yeast dual fluorescent reporter plasmids used herein

p425-GFP_stop_mCherry:
(SEQ ID NO: 730)
ATGTCTAAAGGTGAAGAATTATTCACTGGTGTTGTCCCAATTTTGGTTGAATTAGAT
GGTGATGTTAATGGTCACAAATTTTCTGTCTCCGGTGAAGGTGAAGGTGATGCTAC
TTACGGTAAATTGACCTTAAAATTTATTTGTACTACTGGTAAATTGCCAGTTCCATG
GCCAACCTTAGTCACTACTTTCGGTTATGGTGTTCAATGTTTTGCTAGATACCCAGA
TCATATGAAACAACATGACTTTTTCAAGTCTGCCATGCCAGAAGGTTATGTTCAAG
AAAGAACTATTTTTTTCAAAGATGACGGTAACTACAAGACCAGAGCTGAAGTCAA
GTTTGAAGGTGATACCTTAGTTAATAGAATCGAATTAAAAGGTATTGATTTTAAAGA
AGATGGTAACATTTTAGGTCACAAATTGGAATACAACTATAACTCTCACAATGTTTA
CATCATGGCTGACAAACAAAAGAATGGTATCAAAGTTAACTTCAAAATTAGACAC
AACATTGAAGATGGTTCTGTTCAATTAGCTGACCATTATCAACAAAATACTCCAATT
GGTGATGGTCCAGTCTTGTTACCAGACAACCATTACTTATCCACTCAATCTGCCTTA
TCCAAAGATCCAAACGAAAAGAGAGACCACATGGTCTTGTTAGAATTTGTTACTG
CTGCTGGTATTACCCATGGTATGGATGAATTGTACAAAGCTAGCAACCTGGGTCAA
TCCTTGGGGCCCAGACTGAGCACGTGATGGCAGAGCACAGGAGACGTCATGGT
TTCAAAAGGTGAAGAAGATAATATGGCTATTATTAAAGAATTTATGAGATTTAAAGTTCATA
TGGAAGGTTCAGTTAATGGTCATGAATTTGAAATTGAAGGTGAAGGTGAAGGTAGACCA
TATGAAGGTACTCAAACTGCTAAATTGAAAGTTACTAAAGGTGGTCCATTACCATTTGCTT
GGGATATTTTGTCACCACAATTTATGTATGGTTCAAAAGCTTATGTTAAACATCCAGCTGA
TATTCCAGATTATTTAAAATTGTCATTTCCAGAAGGTTTTAAATGGGAAAGAGTTATGAATT
TTGAAGATGGTGGTGTTGTTACTGTTACTCAAGATTCATCATTACAAGATGGTGAATTTAT
TTATAAAGTTAAATTGAGAGGTACTAATTTTCCATCAGATGGTCCAGTTATGCAAAAAAAA
ACTATGGGTTGGGAAGCTTCATCAGAAAGAATGTATCCAGAAGATGGTGCTTTAAAAGG
TGAAATTAAACAAAGATTGAAATTAAAAGATGGTGGTCATTATGATGCTGAAGTTAAAACT
ACTTATAAAGCTAAAAAACCAGTTCAATTACCAGGTGCTTATAATGTTAATATTAAATTGGA
TATTACTTCACATAATGAAGATTATACTATTGTTGAACAATATGAAAGAGCTGAAGGTAGAC
ATTCAACTGGTGGTATGGATGAATTATATAAAGGTACCGCTCGAGCAGCTGTGATTGATT
GAGTCGACTTGGTTGAACACGTTGCCAAGGCTTAAGTGAATTTACTTTAAATCTTG
CATTTAAATAAATTTTCTTTTTATAGCTTTATGACTTAGTTTCAATTTATATACTATTTT
AATGACATTTTCGATTCGGATCCACTAGTTCTAGAGCGGCCGCCACCGCGGTGGAG
CTCCAGCTTTTGTTCCCTTTAGTGAGGGTTAATTGCGCGCTTGGCGTAATCATGGTC
ATAGCTGTTTCCTGTGTGAAATTGTTATCCGCTCACAATTCCACACAACATAGGAG
CCGGAAGCATAAAGTGTAAAGCCTGGGGTGCCTAATGAGTGAGGTAACTCACATT
AATTGCGTTGCGCTCACTGCCCGCTTTCCAGTCGGGAAACCTGTCGTGCCAGCTG
CATTAATGAATCGGCCAACGCGCGGGGAGAGGCGGTTTGCGTATTGGGCGCTCTT
CCGCTTCCTCGCTCACTGACTCGCTGCGCTCGGTCGTTCGGCTGCGGCGAGCGGT
ATCAGCTCACTCAAAGGCGGTAATACGGTTATCCACAGAATCAGGGGATAACGCA
GGAAAGAACATGTGAGCAAAAGGCCAGCAAAAGGCCAGGAACCGTAAAAAGGC
CGCGTTGCTGGCGTTTTTCCATAGGCTCCGCCCCCCTGACGAGCATCACAAAAATC
GACGCTCAAGTCAGAGGTGGCGAAACCCGACAGGACTATAAAGATACCAGGCGT
TTCCCCCTGGAAGCTCCCTCGTGCGCTCTCCTGTTCCGACCCTGCCGCTTACCGGA
TACCTGTCCGCCTTTCTCCCTTCGGGAAGCGTGGCGCTTTCTCATAGCTCACGCTG
TAGGTATCTCAGTTCGGTGTAGGTCGTTCGCTCCAAGCTGGGCTGTGTGCACGAAC
CCCCCGTTCAGCCCGACCGCTGCGCCTTATCCGGTAACTATCGTCTTGAGTCCAAC
CCGGTAAGACACGACTTATCGCCACTGGCAGCAGCCACTGGTAACAGGATTAGCA
GAGCGAGGTATGTAGGCGGTGCTACAGAGTTCTTGAAGTGGTGGCCTAACTACGG
CTACACTAGAAGGACAGTATTTGGTATCTGCGCTCTGCTGAAGCCAGTTACCTTCG
GAAAAAGAGTTGGTAGCTCTTGATCCGGCAAACAAACCACCGCTGGTAGCGGTG
GTTTTTTTGTTTGCAAGCAGCAGATTACGCGCAGAAAAAAAGGATCTCAAGAAGA
TCCTTTGATCTTTTCTACGGGGTCTGACGCTCAGTGGAACGAAAACTCACGTTAAG
GGATTTTGGTCATGAGATTATCAAAAAGGATCTTCACCTAGATCCTTTTAAATTAAA
AATGAAGTTTTAAATCAATCTAAAGTATATATGAGTAAACTTGGTCTGACAGTTACC
AATGCTTAATCAGTGAGGCACCTATCTCAGCGATCTGTCTATTTCGTTCATCCATAG
TTGCCTGACTCCCCGTCGTGTAGATAACTACGATACGGGAGGGCTTACCATCTGGC
CCCAGTGCTGCAATGATACCGCGAGACCCACGCTCACCGGCTCCAGATTTATCAGC
AATAAACCAGCCAGCCGGAAGGGCCGAGCGCAGAAGTGGTCCTGCAACTTTATCC
GCCTCCATCCAGTCTATTAATTGTTGCCGGGAAGCTAGAGTAAGTAGTTCGCCAGT
TAATAGTTTGCGCAACGTTGTTGCCATTGCTACAGGCATCGTGGTGTCACGCTCGT
CGTTTGGTATGGCTTCATTCAGCTCCGGTTCCCAACGATCAAGGCGAGTTACATGA
TCCCCCATGTTGTGCAAAAAAGCGGTTAGCTCCTTCGGTCCTCCGATCGTTGTCAG
AAGTAAGTTGGCCGCAGTGTTATCACTCATGGTTATGGCAGCACTGCATAATTCTC
TTACTGTCATGCCATCCGTAAGATGCTTTTCTGTGACTGGTGAGTACTCAACCAAG
TCATTCTGAGAATAGTGTATGCGGCGACCGAGTTGCTCTTGCCCGGCGTCAATACG
GGATAATACCGCGCCACATAGCAGAACTTTAAAAGTGCTCATCATTGGAAAACGTT
CTTCGGGGCGAAAACTCTCAAGGATCTTACCGCTGTTGAGATCCAGTTCGATGTAA
CCCACTCGTGCACCCAACTGATCTTCAGCATCTTTTACTTTCACCAGCGTTTCTGG
GTGAGCAAAAACAGGAAGGCAAAATGCCGCAAAAAAGGGAATAAGGGCGACAC
GGAAATGTTGAATACTCATACTCTTCCTTTTTCAATATTATTGAAGCATTTATCAGGG
TTATTGTCTCATGAGCGGATACATATTTGAATGTATTTAGAAAAATAAACAAATAGG
GGTTCCGCGCACATTTCCCCGAAAAGTGCCACCTGAACGAAGCATCTGTGCTTCA
TTTTGTAGAACAAAAATGCAACGCGAGAGCGCTAATTTTTCAAACAAAGAATCTG
AGCTGCATTTTTACAGAACAGAAATGCAACGCGAAAGCGCTATTTTACCAACGAA
GAATCTGTGCTTCATTTTTGTAAAACAAAAATGCAACGCGAGAGCGCTAATTTTTC
AAACAAAGAATCTGAGCTGCATTTTTACAGAACAGAAATGCAACGCGAGAGCGCT
ATTTTACCAACAAAGAATCTATACTTCTTTTTTGTTCTACAAAAATGCATCCCGAGA
GCGCTATTTTTCTAACAAAGCATCTTAGATTACTTTTTTTCTCCTTTGTGCGCTCTAT
AATGCAGTCTCTTGATAACTTTTTGCACTGTAGGTCCGTTAAGGTTAGAAGAAGGC
TACTTTGGTGTCTATTTTCTCTTCCATAAAAAAAGCCTGACTCCACTTCCCGCGTTT
ACTGATTACTAGCGAAGCTGCGGGTGCATTTTTTCAAGATAAAGGCATCCCCGATT
ATATTCTATACCGATGTGGATTGCGCATACTTTGTGAACAGAAAGTGATAGCGTTGA
TGATTCTTCATTGGTCAGAAAATTATGAACGGTTTCTTCTATTTTGTCTCTATATACT
ACGTATAGGAAATGTTTACATTTTCGTATTGTTTTCGATTCACTCTATGAATAGTTCT
TACTACAATTTTTTTGTCTAAAGAGTAATACTAGAGATAAACATAAAAAATGTAGAG
GTCGAGTTTAGATGCAAGTTCAAGGAGCGAAAGGTGGATGGGTAGGTTATATAGG
GATATAGCACAGAGATATATAGCAAAGAGATACTTTTGAGCAATGTTTGTGGAAGC
GGTATTCGCAATATTTTAGTAGCTCGTTACAGTCCGGTGCGTTTTTGGTTTTTTGAA
AGTGCGTCTTCAGAGCGCTTTTGGTTTTCAAAAGCGCTCTGAAGTTCCTATACTTT
CTAGAGAATAGGAACTTCGGAATAGGAACTTCAAAGCGTTTCCGAAAACGAGCGC
TTCCGAAAATGCAACGCGAGCTGCGCACATACAGCTCACTGTTCACGTCGCACCT
ATATCTGCGTGTTGCCTGTATATATATATACATGAGAAGAACGGCATAGTGCGTGTTT
ATGCTTAAATGCGTACTTATATGCGTCTATTTATGTAGGATGAAAGGTAGTCTAGTAC
CTCCTGTGATATTATCCCATTCCATGCGGGGTATCGTATGCTTCCTTCAGCACTACCC
TTTAGCTGTTCTATATGCTGCCACTCCTCAATTGGATTAGTCTCATCCTTCAATGCTA
TCATTTCCTTTGATATTGGATCATACTAAGAAACCATTATTATCATGACATTAACCTA
TAAAAATAGGCGTATCACGAGGCCCTTTCGTCTCGCGCGTTTCGGTGATGACGGTG
AAAACCTCTGACACATGCAGCTCCCGGAGACGGTCACAGCTTGTCTGTAAGCGGA
TGCCGGGAGCAGACAAGCCCGTCAGGGCGCGTCAGCGGGTGTTGGCGGGTGTCG
GGGCTGGCTTAACTATGCGGCATCAGAGCAGATTGTACTGAGAGTGCACCATATCG
ACTACGTCGTAAGGCCGTTTCTGACAGAGTAAAATTCTTGAGGGAACTTTCACCAT
TATGGGAAATGCTTCAAGAAGGTATTGACTTAAACTCCATCAAATGGTCAGGTCAT
TGAGTGTTTTTTATTTGTTGTATTTTTTTTTTTTTAGAGAAAATCCTCCAATATCAAA
TTAGGAATCGTAGTTTCATGATTTTCTGTTACACCTAACTTTTTGTGTGGTGCCCTC
CTCCTTGTCAATATTAATGTTAAAGTGCAATTCTTTTTCCTTATCACGTTGAGCCATT
AGTATCAATTTGCTTACCTGTATTCCTTTACTATCCTCCTTTTTCTCCTTCTTGATAA
ATGTATGTAGATTGCGTATATAGTTTCGTCTACCCTATGAACATATTCCATTTTGTAAT
TTCGTGTCGTTTCTATTATGAATTTCATTTATAAAGTTTATGTACAAATATCATAAAA
AAAGAGAATCTTTTTAAGCAAGGATTTTCTTAACTTCTTCGGCGACAGCATCACCG
ACTTCGGTGGTACTGTTGGAACCACCTAAATCACCAGTTCTGATACCTGCATCCAA
AACCTTTTTAACTGCATCTTCAATGGCCTTACCTTCTTCAGGCAAGTTCAATGACA
ATTTCAACATCATTGCAGCAGACAAGATAGTGGCGATAGGGTCAACCTTATTCTTT
GGCAAATCTGGAGCAGAACCGTGGCATGGTTCGTACAAACCAAATGCGGTGTTCT
TGTCTGGCAAAGAGGCCAAGGACGCAGATGGCAACAAACCCAAGGAACCTGGGA
TAACGGAGGCTTCATCGGAGATGATATCACCAAACATGTTGCTGGTGATTATAATAC
CATTTAGGTGGGTTGGGTTCTTAACTAGGATCATGGCGGCAGAATCAATCAATTGA
TGTTGAACCTTCAATGTAGGGAATTCGTTCTTGATGGTTTCCTCCACAGTTTTTCTC
CATAATCTTGAAGAGGCCAAAAGATTAGCTTTATCCAAGGACCAAATAGGCAATGG
TGGCTCATGTTGTAGGGCCATGAAAGCGGCCATTCTTGTGATTCTTTGCACTTCTG
GAACGGTGTATTGTTCACTATCCCAAGCGACACCATCACCATCGTCTTCCTTTCTCT
TACCAAAGTAAATACCTCCCACTAATTCTCTGACAACAACGAAGTCAGTACCTTTA
GCAAATTGTGGCTTGATTGGAGATAAGTCTAAAAGAGAGTCGGATGCAAAGTTAC
ATGGTCTTAAGTTGGCGTACAATTGAAGTTCTTTACGGATTTTTAGTAAACCTTGTT
CAGGTCTAACACTACCGGTACCCCATTTAGGACCAGCCACAGCACCTAACAAAAC
GGCATCAACCTTCTTGGAGGCTTCCAGCGCCTCATCTGGAAGTGGGACACCTGTA
GCATCGATAGCAGCACCACCAATTAAATGATTTTCGAAATCGAACTTGACATTGGA
ACGAACATCAGAAATAGCTTTAAGAACCTTAATGGCTTCGGCTGTGATTTCTTGAC
CAACGTGGTCACCTGGCAAAACGACGATCTTCTTAGGGGCAGACATAGGGGCAG
ACATTAGAATGGTATATCCTTGAAATATATATATATATTGCTGAAATGTAAAAGGTAA
GAAAAGTTAGAAAGTAAGACGATTGCTAACCACCTATTGGAAAAAACAATAGGTC
CTTAAATAATATTGTCAACTTCAAGTATTGTGATGCAAGCATTTAGTCATGAACGCT
TCTCTATTCTATATGAAAAGCCGGTTCCGGCCTCTCACCTTTCCTTTTTCTCCCAATT
TTTCAGTTGAAAAAGGTATATGCGTCAGGCGACCTCTGAAATTAACAAAAAATTTC
CAGTCATCGAATTTGATTCTGTGCGATAGCGCCCCTGTGTGTTCTCGTTATGTTGAG
GAAAAAAATAATGGTTGCTAAGAGATTCGAACTCTTGCATCTTACGATACCTGAGT
ATTCCCACAGTTAACTGCGGTCAAGATATTTCTTGAATCAGGCGCCTTAGACCGCT
CGGCCAAACAACCAATTACTTGTTGAGAAATAGAGTATAATTATCCTATAAATATAA
CGTTTTTGAACACACATGAACAAGGAAGTACAGGACAATTGATTTTGAAGAGAAT
GTGGATTTTGATGTAATTGTTGGGATTCCATTTTTAATAAGGCAATAATATTAGGTAT
GTGGATATACTAGAAGTTCTCCTCGACCGTCGATATGCGGTGTGAAATACCGCACA
GATGCGTAAGGAGAAAATACCGCATCAGGAAATTGTAAACGTTAATATTTTGTTAA
AATTCGCGTTAAATTTTTGTTAAATCAGCTCATTTTTTAACCAATAGGCCGAAATCG
GCAAAATCCCTTATAAATCAAAAGAATAGACCGAGATAGGGTTGAGTGTTGTTCCA
GTTTGGAACAAGAGTCCACTATTAAAGAACGTGGACTCCAACGTCAAAGGGCGA
AAAACCGTCTATCAGGGCGATGGCCCACTACGTGAACCATCACCCTAATCAAGTTT
TTTGGGGTCGAGGTGCCGTAAAGCACTAAATCGGAACCCTAAAGGGAGCCCCCGA
TTTAGAGCTTGACGGGGAAAGCCGGCGAACGTGGCGAGAAAGGAAGGGAAGAA
AGCGAAAGGAGCGGGCGCTAGGGCGCTGGCAAGTGTAGCGGTCACGCTGCGCGT
AACCACCACACCCGCCGCGCTTAATGCGCCGCTACAGGGCGCGTCGCGCCATTCG
CCATTCAGGCTGCGCAACTGTTGGGAAGGGCGATCGGTGCGGGCCTCTTCGCTAT
TACGCCAGCTGGCGAAAGGGGGATGTGCTGCAAGGCGATTAAGTTGGGTAACGCC
AGGGTTTTCCCAGTCACGACGTTGTAAAACGACGGCCAGTGAGCGCGCGTAATAC
GACTCACTATAGGGCGAATTGGGTACCGGGCCCCCCCTCGAGGTCGACGGTATCG
ATAAGCTTGATATCGAATTCCTGCAGCCCGGGGGATCCGTTAGAATCATTTTGAATA
AAAAACACGCTTTTTCAGTTCGAGTTTATCATTATCAATACTGCCATTTCAAAGAAT
ACGTAAATAATTAATAGTAGTGATTTTCCTAACTTTATTTAGTCAAAAAATTAGCCTT
TTAATTCTGCTGTAACCCGTACATGCCCAAAATAGGGGGCGGGTTACACAGAATAT
ATAACATCGTAGGTGTCTGGGTGAACAGTTTATTCCTGGCATCCACTAAATATAATG
GAGCCCGCTTTTTAAGCTGGCATCCAGAAAAAAAAAGAATCCCAGCACCAAAATA
TTGTTTTCTTCACCAACCATCAGTTCATAGGTCCATTCTCTTAGCGCAACTACAGAG
AACAGGGGCACAAACAGGCAAAAAACGGGCACAACCTCAATGGAGTGATGCAA
CCTGCCTGGAGTAAATGATGACACAAGGCAATTGACCCACGCATGTATCTATCTCA
TTTTCTTACACCTTCTATTACCTTCTGCTCTCTCTGATTTGGAAAAAGCTGAAAAAA
AAGGTTGAAACCAGTTCCCTGAAATTATTCCCCTACTTGACTAATAAGTATATAAAG
ACGGTAGGTATTGATTGTAATTCTGTAAATCTATTTCTTAAACTTCTTAAATTCTACT
TTTATAGTTAGTCTTTTTTTTAGTTTTAAAACACCAAGAACTTAGTTTCGAATAAAC
ACACATAAACAAACAAAGAATTC
p425-GFP_+1fs_mCherry:
(SEQ ID NO: 731)
ATGTCTAAAGGTGAAGAATTATTCACTGGTGTTGTCCCAATTTTGGTTGAATTAGAT
GGTGATGTTAATGGTCACAAATTTTCTGTCTCCGGTGAAGGTGAAGGTGATGCTAC
TTACGGTAAATTGACCTTAAAATTTATTTGTACTACTGGTAAATTGCCAGTTCCATG
GCCAACCTTAGTCACTACTTTCGGTTATGGTGTTCAATGTTTTGCTAGATACCCAGA
TCATATGAAACAACATGACTTTTTCAAGTCTGCCATGCCAGAAGGTTATGTTCAAG
AAAGAACTATTTTTTTCAAAGATGACGGTAACTACAAGACCAGAGCTGAAGTCAA
GTTTGAAGGTGATACCTTAGTTAATAGAATCGAATTAAAAGGTATTGATTTTAAAGA
AGATGGTAACATTTTAGGTCACAAATTGGAATACAACTATAACTCTCACAATGTTTA
CATCATGGCTGACAAACAAAAGAATGGTATCAAAGTTAACTTCAAAATTAGACAC
AACATTGAAGATGGTTCTGTTCAATTAGCTGACCATTATCAACAAAATACTCCAATT
GGTGATGGTCCAGTCTTGTTACCAGACAACCATTACTTATCCACTCAATCTGCCTTA
TCCAAAGATCCAAACGAAAAGAGAGACCACATGGTCTTGTTAGAATTTGTTACTG
CTGCTGGTATTACCCATGGTATGGATGAATTGTACAAAGCTAGCAAACCTGGGTCA
ATCCTTGGGGCCCAGACTGAGCACGTGATGGCAGAGCACAGGAGACGTCATGG
TTTCAAAAGGTGAAGAAGATAATATGGCTATTATTAAAGAATTTATGAGATTTAAAGTTCAT
ATGGAAGGTTCAGTTAATGGTCATGAATTTGAAATTGAAGGTGAAGGTGAAGGTAGACC
ATATGAAGGTACTCAAACTGCTAAATTGAAAGTTACTAAAGGTGGTCCATTACCATTTGCT
TGGGATATTTTGTCACCACAATTTATGTATGGTTCAAAAGCTTATGTTAAACATCCAGCTG
ATATTCCAGATTATTTAAAATTGTCATTTCCAGAAGGTTTTAAATGGGAAAGAGTTATGAAT
TTTGAAGATGGTGGTGTTGTTACTGTTACTCAAGATTCATCATTACAAGATGGTGAATTTA
TTTATAAAGTTAAATTGAGAGGTACTAATTTTCCATCAGATGGTCCAGTTATGCAAAAAAA
AACTATGGGTTGGGAAGCTTCATCAGAAAGAATGTATCCAGAAGATGGTGCTTTAAAAG
GTGAAATTAAACAAAGATTGAAATTAAAAGATGGTGGTCATTATGATGCTGAAGTTAAAAC
TACTTATAAAGCTAAAAAACCAGTTCAATTACCAGGTGCTTATAATGTTAATATTAAATTGG
ATATTACTTCACATAATGAAGATTATACTATTGTTGAACAATATGAAAGAGCTGAAGGTAGA
CATTCAACTGGTGGTATGGATGAATTATATAAAGGTACCGCTCGAGCAGCTGTGATTGAT
TGAGTCGACTTGGTTGAACACGTTGCCAAGGCTTAAGTGAATTTACTTTAAATCTT
GCATTTAAATAAATTTTCTTTTTATAGCTTTATGACTTAGTTTCAATTTATATACTATT
TTAATGACATTTTCGATTCGGATCCACTAGTTCTAGAGCGGCCGCCACCGCGGTGG
AGCTCCAGCTTTTGTTCCCTTTAGTGAGGGTTAATTGCGCGCTTGGCGTAATCATG
GTCATAGCTGTTTCCTGTGTGAAATTGTTATCCGCTCACAATTCCACACAACATAGG
AGCCGGAAGCATAAAGTGTAAAGCCTGGGGTGCCTAATGAGTGAGGTAACTCACA
TTAATTGCGTTGCGCTCACTGCCCGCTTTCCAGTCGGGAAACCTGTCGTGCCAGCT
GCATTAATGAATCGGCCAACGCGCGGGGAGAGGCGGTTTGCGTATTGGGCGCTCT
TCCGCTTCCTCGCTCACTGACTCGCTGCGCTCGGTCGTTCGGCTGCGGCGAGCGG
TATCAGCTCACTCAAAGGCGGTAATACGGTTATCCACAGAATCAGGGGATAACGCA
GGAAAGAACATGTGAGCAAAAGGCCAGCAAAAGGCCAGGAACCGTAAAAAGGC
CGCGTTGCTGGCGTTTTTCCATAGGCTCCGCCCCCCTGACGAGCATCACAAAAATC
GACGCTCAAGTCAGAGGTGGCGAAACCCGACAGGACTATAAAGATACCAGGCGT
TTCCCCCTGGAAGCTCCCTCGTGCGCTCTCCTGTTCCGACCCTGCCGCTTACCGGA
TACCTGTCCGCCTTTCTCCCTTCGGGAAGCGTGGCGCTTTCTCATAGCTCACGCTG
TAGGTATCTCAGTTCGGTGTAGGTCGTTCGCTCCAAGCTGGGCTGTGTGCACGAAC
CCCCCGTTCAGCCCGACCGCTGCGCCTTATCCGGTAACTATCGTCTTGAGTCCAAC
CCGGTAAGACACGACTTATCGCCACTGGCAGCAGCCACTGGTAACAGGATTAGCA
GAGCGAGGTATGTAGGCGGTGCTACAGAGTTCTTGAAGTGGTGGCCTAACTACGG
CTACACTAGAAGGACAGTATTTGGTATCTGCGCTCTGCTGAAGCCAGTTACCTTCG
GAAAAAGAGTTGGTAGCTCTTGATCCGGCAAACAAACCACCGCTGGTAGCGGTG
GTTTTTTTGTTTGCAAGCAGCAGATTACGCGCAGAAAAAAAGGATCTCAAGAAGA
TCCTTTGATCTTTTCTACGGGGTCTGACGCTCAGTGGAACGAAAACTCACGTTAAG
GGATTTTGGTCATGAGATTATCAAAAAGGATCTTCACCTAGATCCTTTTAAATTAAA
AATGAAGTTTTAAATCAATCTAAAGTATATATGAGTAAACTTGGTCTGACAGTTACC
AATGCTTAATCAGTGAGGCACCTATCTCAGCGATCTGTCTATTTCGTTCATCCATAG
TTGCCTGACTCCCCGTCGTGTAGATAACTACGATACGGGAGGGCTTACCATCTGGC
CCCAGTGCTGCAATGATACCGCGAGACCCACGCTCACCGGCTCCAGATTTATCAGC
AATAAACCAGCCAGCCGGAAGGGCCGAGCGCAGAAGTGGTCCTGCAACTTTATCC
GCCTCCATCCAGTCTATTAATTGTTGCCGGGAAGCTAGAGTAAGTAGTTCGCCAGT
TAATAGTTTGCGCAACGTTGTTGCCATTGCTACAGGCATCGTGGTGTCACGCTCGT
CGTTTGGTATGGCTTCATTCAGCTCCGGTTCCCAACGATCAAGGCGAGTTACATGA
TCCCCCATGTTGTGCAAAAAAGCGGTTAGCTCCTTCGGTCCTCCGATCGTTGTCAG
AAGTAAGTTGGCCGCAGTGTTATCACTCATGGTTATGGCAGCACTGCATAATTCTC
TTACTGTCATGCCATCCGTAAGATGCTTTTCTGTGACTGGTGAGTACTCAACCAAG
TCATTCTGAGAATAGTGTATGCGGCGACCGAGTTGCTCTTGCCCGGCGTCAATACG
GGATAATACCGCGCCACATAGCAGAACTTTAAAAGTGCTCATCATTGGAAAACGTT
CTTCGGGGCGAAAACTCTCAAGGATCTTACCGCTGTTGAGATCCAGTTCGATGTAA
CCCACTCGTGCACCCAACTGATCTTCAGCATCTTTTACTTTCACCAGCGTTTCTGG
GTGAGCAAAAACAGGAAGGCAAAATGCCGCAAAAAAGGGAATAAGGGCGACAC
GGAAATGTTGAATACTCATACTCTTCCTTTTTCAATATTATTGAAGCATTTATCAGGG
TTATTGTCTCATGAGCGGATACATATTTGAATGTATTTAGAAAAATAAACAAATAGG
GGTTCCGCGCACATTTCCCCGAAAAGTGCCACCTGAACGAAGCATCTGTGCTTCA
TTTTGTAGAACAAAAATGCAACGCGAGAGCGCTAATTTTTCAAACAAAGAATCTG
AGCTGCATTTTTACAGAACAGAAATGCAACGCGAAAGCGCTATTTTACCAACGAA
GAATCTGTGCTTCATTTTTGTAAAACAAAAATGCAACGCGAGAGCGCTAATTTTTC
AAACAAAGAATCTGAGCTGCATTTTTACAGAACAGAAATGCAACGCGAGAGCGCT
ATTTTACCAACAAAGAATCTATACTTCTTTTTTGTTCTACAAAAATGCATCCCGAGA
GCGCTATTTTTCTAACAAAGCATCTTAGATTACTTTTTTTCTCCTTTGTGCGCTCTAT
AATGCAGTCTCTTGATAACTTTTTGCACTGTAGGTCCGTTAAGGTTAGAAGAAGGC
TACTTTGGTGTCTATTTTCTCTTCCATAAAAAAAGCCTGACTCCACTTCCCGCGTTT
ACTGATTACTAGCGAAGCTGCGGGTGCATTTTTTCAAGATAAAGGCATCCCCGATT
ATATTCTATACCGATGTGGATTGCGCATACTTTGTGAACAGAAAGTGATAGCGTTGA
TGATTCTTCATTGGTCAGAAAATTATGAACGGTTTCTTCTATTTTGTCTCTATATACT
ACGTATAGGAAATGTTTACATTTTCGTATTGTTTTCGATTCACTCTATGAATAGTTCT
TACTACAATTTTTTTGTCTAAAGAGTAATACTAGAGATAAACATAAAAAATGTAGAG
GTCGAGTTTAGATGCAAGTTCAAGGAGCGAAAGGTGGATGGGTAGGTTATATAGG
GATATAGCACAGAGATATATAGCAAAGAGATACTTTTGAGCAATGTTTGTGGAAGC
GGTATTCGCAATATTTTAGTAGCTCGTTACAGTCCGGTGCGTTTTTGGTTTTTTGAA
AGTGCGTCTTCAGAGCGCTTTTGGTTTTCAAAAGCGCTCTGAAGTTCCTATACTTT
CTAGAGAATAGGAACTTCGGAATAGGAACTTCAAAGCGTTTCCGAAAACGAGCGC
TTCCGAAAATGCAACGCGAGCTGCGCACATACAGCTCACTGTTCACGTCGCACCT
ATATCTGCGTGTTGCCTGTATATATATATACATGAGAAGAACGGCATAGTGCGTGTTT
ATGCTTAAATGCGTACTTATATGCGTCTATTTATGTAGGATGAAAGGTAGTCTAGTAC
CTCCTGTGATATTATCCCATTCCATGCGGGGTATCGTATGCTTCCTTCAGCACTACCC
TTTAGCTGTTCTATATGCTGCCACTCCTCAATTGGATTAGTCTCATCCTTCAATGCTA
TCATTTCCTTTGATATTGGATCATACTAAGAAACCATTATTATCATGACATTAACCTA
TAAAAATAGGCGTATCACGAGGCCCTTTCGTCTCGCGCGTTTCGGTGATGACGGTG
AAAACCTCTGACACATGCAGCTCCCGGAGACGGTCACAGCTTGTCTGTAAGCGGA
TGCCGGGAGCAGACAAGCCCGTCAGGGCGCGTCAGCGGGTGTTGGCGGGTGTCG
GGGCTGGCTTAACTATGCGGCATCAGAGCAGATTGTACTGAGAGTGCACCATATCG
ACTACGTCGTAAGGCCGTTTCTGACAGAGTAAAATTCTTGAGGGAACTTTCACCAT
TATGGGAAATGCTTCAAGAAGGTATTGACTTAAACTCCATCAAATGGTCAGGTCAT
TGAGTGTTTTTTATTTGTTGTATTTTTTTTTTTTTAGAGAAAATCCTCCAATATCAAA
TTAGGAATCGTAGTTTCATGATTTTCTGTTACACCTAACTTTTTGTGTGGTGCCCTC
CTCCTTGTCAATATTAATGTTAAAGTGCAATTCTTTTTCCTTATCACGTTGAGCCATT
AGTATCAATTTGCTTACCTGTATTCCTTTACTATCCTCCTTTTTCTCCTTCTTGATAA
ATGTATGTAGATTGCGTATATAGTTTCGTCTACCCTATGAACATATTCCATTTTGTAAT
TTCGTGTCGTTTCTATTATGAATTTCATTTATAAAGTTTATGTACAAATATCATAAAA
AAAGAGAATCTTTTTAAGCAAGGATTTTCTTAACTTCTTCGGCGACAGCATCACCG
ACTTCGGTGGTACTGTTGGAACCACCTAAATCACCAGTTCTGATACCTGCATCCAA
AACCTTTTTAACTGCATCTTCAATGGCCTTACCTTCTTCAGGCAAGTTCAATGACA
ATTTCAACATCATTGCAGCAGACAAGATAGTGGCGATAGGGTCAACCTTATTCTTT
GGCAAATCTGGAGCAGAACCGTGGCATGGTTCGTACAAACCAAATGCGGTGTTCT
TGTCTGGCAAAGAGGCCAAGGACGCAGATGGCAACAAACCCAAGGAACCTGGGA
TAACGGAGGCTTCATCGGAGATGATATCACCAAACATGTTGCTGGTGATTATAATAC
CATTTAGGTGGGTTGGGTTCTTAACTAGGATCATGGCGGCAGAATCAATCAATTGA
TGTTGAACCTTCAATGTAGGGAATTCGTTCTTGATGGTTTCCTCCACAGTTTTTCTC
CATAATCTTGAAGAGGCCAAAAGATTAGCTTTATCCAAGGACCAAATAGGCAATGG
TGGCTCATGTTGTAGGGCCATGAAAGCGGCCATTCTTGTGATTCTTTGCACTTCTG
GAACGGTGTATTGTTCACTATCCCAAGCGACACCATCACCATCGTCTTCCTTTCTCT
TACCAAAGTAAATACCTCCCACTAATTCTCTGACAACAACGAAGTCAGTACCTTTA
GCAAATTGTGGCTTGATTGGAGATAAGTCTAAAAGAGAGTCGGATGCAAAGTTAC
ATGGTCTTAAGTTGGCGTACAATTGAAGTTCTTTACGGATTTTTAGTAAACCTTGTT
CAGGTCTAACACTACCGGTACCCCATTTAGGACCAGCCACAGCACCTAACAAAAC
GGCATCAACCTTCTTGGAGGCTTCCAGCGCCTCATCTGGAAGTGGGACACCTGTA
GCATCGATAGCAGCACCACCAATTAAATGATTTTCGAAATCGAACTTGACATTGGA
ACGAACATCAGAAATAGCTTTAAGAACCTTAATGGCTTCGGCTGTGATTTCTTGAC
CAACGTGGTCACCTGGCAAAACGACGATCTTCTTAGGGGCAGACATAGGGGCAG
ACATTAGAATGGTATATCCTTGAAATATATATATATATTGCTGAAATGTAAAAGGTAA
GAAAAGTTAGAAAGTAAGACGATTGCTAACCACCTATTGGAAAAAACAATAGGTC
CTTAAATAATATTGTCAACTTCAAGTATTGTGATGCAAGCATTTAGTCATGAACGCT
TCTCTATTCTATATGAAAAGCCGGTTCCGGCCTCTCACCTTTCCTTTTTCTCCCAATT
TTTCAGTTGAAAAAGGTATATGCGTCAGGCGACCTCTGAAATTAACAAAAAATTTC
CAGTCATCGAATTTGATTCTGTGCGATAGCGCCCCTGTGTGTTCTCGTTATGTTGAG
GAAAAAAATAATGGTTGCTAAGAGATTCGAACTCTTGCATCTTACGATACCTGAGT
ATTCCCACAGTTAACTGCGGTCAAGATATTTCTTGAATCAGGCGCCTTAGACCGCT
CGGCCAAACAACCAATTACTTGTTGAGAAATAGAGTATAATTATCCTATAAATATAA
CGTTTTTGAACACACATGAACAAGGAAGTACAGGACAATTGATTTTGAAGAGAAT
GTGGATTTTGATGTAATTGTTGGGATTCCATTTTTAATAAGGCAATAATATTAGGTAT
GTGGATATACTAGAAGTTCTCCTCGACCGTCGATATGCGGTGTGAAATACCGCACA
GATGCGTAAGGAGAAAATACCGCATCAGGAAATTGTAAACGTTAATATTTTGTTAA
AATTCGCGTTAAATTTTTGTTAAATCAGCTCATTTTTTAACCAATAGGCCGAAATCG
GCAAAATCCCTTATAAATCAAAAGAATAGACCGAGATAGGGTTGAGTGTTGTTCCA
GTTTGGAACAAGAGTCCACTATTAAAGAACGTGGACTCCAACGTCAAAGGGCGA
AAAACCGTCTATCAGGGCGATGGCCCACTACGTGAACCATCACCCTAATCAAGTTT
TTTGGGGTCGAGGTGCCGTAAAGCACTAAATCGGAACCCTAAAGGGAGCCCCCGA
TTTAGAGCTTGACGGGGAAAGCCGGCGAACGTGGCGAGAAAGGAAGGGAAGAA
AGCGAAAGGAGCGGGCGCTAGGGCGCTGGCAAGTGTAGCGGTCACGCTGCGCGT
AACCACCACACCCGCCGCGCTTAATGCGCCGCTACAGGGCGCGTCGCGCCATTCG
CCATTCAGGCTGCGCAACTGTTGGGAAGGGCGATCGGTGCGGGCCTCTTCGCTAT
TACGCCAGCTGGCGAAAGGGGGATGTGCTGCAAGGCGATTAAGTTGGGTAACGCC
AGGGTTTTCCCAGTCACGACGTTGTAAAACGACGGCCAGTGAGCGCGCGTAATAC
GACTCACTATAGGGCGAATTGGGTACCGGGCCCCCCCTCGAGGTCGACGGTATCG
ATAAGCTTGATATCGAATTCCTGCAGCCCGGGGGATCCGTTAGAATCATTTTGAATA
AAAAACACGCTTTTTCAGTTCGAGTTTATCATTATCAATACTGCCATTTCAAAGAAT
ACGTAAATAATTAATAGTAGTGATTTTCCTAACTTTATTTAGTCAAAAAATTAGCCTT
TTAATTCTGCTGTAACCCGTACATGCCCAAAATAGGGGGCGGGTTACACAGAATAT
ATAACATCGTAGGTGTCTGGGTGAACAGTTTATTCCTGGCATCCACTAAATATAATG
GAGCCCGCTTTTTAAGCTGGCATCCAGAAAAAAAAAGAATCCCAGCACCAAAATA
TTGTTTTCTTCACCAACCATCAGTTCATAGGTCCATTCTCTTAGCGCAACTACAGAG
AACAGGGGCACAAACAGGCAAAAAACGGGCACAACCTCAATGGAGTGATGCAA
CCTGCCTGGAGTAAATGATGACACAAGGCAATTGACCCACGCATGTATCTATCTCA
TTTTCTTACACCTTCTATTACCTTCTGCTCTCTCTGATTTGGAAAAAGCTGAAAAAA
AAGGTTGAAACCAGTTCCCTGAAATTATTCCCCTACTTGACTAATAAGTATATAAAG
ACGGTAGGTATTGATTGTAATTCTGTAAATCTATTTCTTAAACTTCTTAAATTCTACT
TTTATAGTTAGTCTTTTTTTTAGTTTTAAAACACCAAGAACTTAGTTTCGAATAAAC
ACACATAAACAAACAAAGAATTC
p425-GFP_−1fs_mCherry:
(SEQ ID NO: 732)
ATGTCTAAAGGTGAAGAATTATTCACTGGTGTTGTCCCAATTTTGGTTGAATTAGAT
GGTGATGTTAATGGTCACAAATTTTCTGTCTCCGGTGAAGGTGAAGGTGATGCTAC
TTACGGTAAATTGACCTTAAAATTTATTTGTACTACTGGTAAATTGCCAGTTCCATG
GCCAACCTTAGTCACTACTTTCGGTTATGGTGTTCAATGTTTTGCTAGATACCCAGA
TCATATGAAACAACATGACTTTTTCAAGTCTGCCATGCCAGAAGGTTATGTTCAAG
AAAGAACTATTTTTTTCAAAGATGACGGTAACTACAAGACCAGAGCTGAAGTCAA
GTTTGAAGGTGATACCTTAGTTAATAGAATCGAATTAAAAGGTATTGATTTTAAAGA
AGATGGTAACATTTTAGGTCACAAATTGGAATACAACTATAACTCTCACAATGTTTA
CATCATGGCTGACAAACAAAAGAATGGTATCAAAGTTAACTTCAAAATTAGACAC
AACATTGAAGATGGTTCTGTTCAATTAGCTGACCATTATCAACAAAATACTCCAATT
GGTGATGGTCCAGTCTTGTTACCAGACAACCATTACTTATCCACTCAATCTGCCTTA
TCCAAAGATCCAAACGAAAAGAGAGACCACATGGTCTTGTTAGAATTTGTTACTG
CTGCTGGTATTACCCATGGTATGGATGAATTGTACAAAGCTAGCAAACCTGGGTCA
ATCCTTGGGGCCCAGACTGAGCACGTGATGGCAGAGCACAGGACGTCATGGTTT
CAAAAGGTGAAGAAGATAATATGGCTATTATTAAAGAATTTATGAGATTTAAAGTTCATATG
GAAGGTTCAGTTAATGGTCATGAATTTGAAATTGAAGGTGAAGGTGAAGGTAGACCATAT
GAAGGTACTCAAACTGCTAAATTGAAAGTTACTAAAGGTGGTCCATTACCATTTGCTTGG
GATATTTTGTCACCACAATTTATGTATGGTTCAAAAGCTTATGTTAAACATCCAGCTGATAT
TCCAGATTATTTAAAATTGTCATTTCCAGAAGGTTTTAAATGGGAAAGAGTTATGAATTTT
GAAGATGGTGGTGTTGTTACTGTTACTCAAGATTCATCATTACAAGATGGTGAATTTATTT
ATAAAGTTAAATTGAGAGGTACTAATTTTCCATCAGATGGTCCAGTTATGCAAAAAAAAAC
TATGGGTTGGGAAGCTTCATCAGAAAGAATGTATCCAGAAGATGGTGCTTTAAAAGGTG
AAATTAAACAAAGATTGAAATTAAAAGATGGTGGTCATTATGATGCTGAAGTTAAAACTAC
TTATAAAGCTAAAAAACCAGTTCAATTACCAGGTGCTTATAATGTTAATATTAAATTGGATAT
TACTTCACATAATGAAGATTATACTATTGTTGAACAATATGAAAGAGCTGAAGGTAGACAT
TCAACTGGTGGTATGGATGAATTATATAAAGGTACCGCTCGAGCAGCTGTGATTGATTGA
GTCGACTTGGTTGAACACGTTGCCAAGGCTTAAGTGAATTTACTTTAAATCTTGCA
TTTAAATAAATTTTCTTTTTATAGCTTTATGACTTAGTTTCAATTTATATACTATTTTA
ATGACATTTTCGATTCGGATCCACTAGTTCTAGAGCGGCCGCCACCGCGGTGGAGC
TCCAGCTTTTGTTCCCTTTAGTGAGGGTTAATTGCGCGCTTGGCGTAATCATGGTCA
TAGCTGTTTCCTGTGTGAAATTGTTATCCGCTCACAATTCCACACAACATAGGAGC
CGGAAGCATAAAGTGTAAAGCCTGGGGTGCCTAATGAGTGAGGTAACTCACATTA
ATTGCGTTGCGCTCACTGCCCGCTTTCCAGTCGGGAAACCTGTCGTGCCAGCTGC
ATTAATGAATCGGCCAACGCGCGGGGAGAGGCGGTTTGCGTATTGGGCGCTCTTC
CGCTTCCTCGCTCACTGACTCGCTGCGCTCGGTCGTTCGGCTGCGGCGAGCGGTAT
CAGCTCACTCAAAGGCGGTAATACGGTTATCCACAGAATCAGGGGATAACGCAGG
AAAGAACATGTGAGCAAAAGGCCAGCAAAAGGCCAGGAACCGTAAAAAGGCCG
CGTTGCTGGCGTTTTTCCATAGGCTCCGCCCCCCTGACGAGCATCACAAAAATCGA
CGCTCAAGTCAGAGGTGGCGAAACCCGACAGGACTATAAAGATACCAGGCGTTTC
CCCCTGGAAGCTCCCTCGTGCGCTCTCCTGTTCCGACCCTGCCGCTTACCGGATAC
CTGTCCGCCTTTCTCCCTTCGGGAAGCGTGGCGCTTTCTCATAGCTCACGCTGTAG
GTATCTCAGTTCGGTGTAGGTCGTTCGCTCCAAGCTGGGCTGTGTGCACGAACCC
CCCGTTCAGCCCGACCGCTGCGCCTTATCCGGTAACTATCGTCTTGAGTCCAACCC
GGTAAGACACGACTTATCGCCACTGGCAGCAGCCACTGGTAACAGGATTAGCAGA
GCGAGGTATGTAGGCGGTGCTACAGAGTTCTTGAAGTGGTGGCCTAACTACGGCT
ACACTAGAAGGACAGTATTTGGTATCTGCGCTCTGCTGAAGCCAGTTACCTTCGGA
AAAAGAGTTGGTAGCTCTTGATCCGGCAAACAAACCACCGCTGGTAGCGGTGGTT
TTTTTGTTTGCAAGCAGCAGATTACGCGCAGAAAAAAAGGATCTCAAGAAGATCC
TTTGATCTTTTCTACGGGGTCTGACGCTCAGTGGAACGAAAACTCACGTTAAGGG
ATTTTGGTCATGAGATTATCAAAAAGGATCTTCACCTAGATCCTTTTAAATTAAAAA
TGAAGTTTTAAATCAATCTAAAGTATATATGAGTAAACTTGGTCTGACAGTTACCAA
TGCTTAATCAGTGAGGCACCTATCTCAGCGATCTGTCTATTTCGTTCATCCATAGTT
GCCTGACTCCCCGTCGTGTAGATAACTACGATACGGGAGGGCTTACCATCTGGCCC
CAGTGCTGCAATGATACCGCGAGACCCACGCTCACCGGCTCCAGATTTATCAGCA
ATAAACCAGCCAGCCGGAAGGGCCGAGCGCAGAAGTGGTCCTGCAACTTTATCCG
CCTCCATCCAGTCTATTAATTGTTGCCGGGAAGCTAGAGTAAGTAGTTCGCCAGTT
AATAGTTTGCGCAACGTTGTTGCCATTGCTACAGGCATCGTGGTGTCACGCTCGTC
GTTTGGTATGGCTTCATTCAGCTCCGGTTCCCAACGATCAAGGCGAGTTACATGAT
CCCCCATGTTGTGCAAAAAAGCGGTTAGCTCCTTCGGTCCTCCGATCGTTGTCAGA
AGTAAGTTGGCCGCAGTGTTATCACTCATGGTTATGGCAGCACTGCATAATTCTCTT
ACTGTCATGCCATCCGTAAGATGCTTTTCTGTGACTGGTGAGTACTCAACCAAGTC
ATTCTGAGAATAGTGTATGCGGCGACCGAGTTGCTCTTGCCCGGCGTCAATACGGG
ATAATACCGCGCCACATAGCAGAACTTTAAAAGTGCTCATCATTGGAAAACGTTCT
TCGGGGCGAAAACTCTCAAGGATCTTACCGCTGTTGAGATCCAGTTCGATGTAAC
CCACTCGTGCACCCAACTGATCTTCAGCATCTTTTACTTTCACCAGCGTTTCTGGG
TGAGCAAAAACAGGAAGGCAAAATGCCGCAAAAAAGGGAATAAGGGCGACACG
GAAATGTTGAATACTCATACTCTTCCTTTTTCAATATTATTGAAGCATTTATCAGGGT
TATTGTCTCATGAGCGGATACATATTTGAATGTATTTAGAAAAATAAACAAATAGGG
GTTCCGCGCACATTTCCCCGAAAAGTGCCACCTGAACGAAGCATCTGTGCTTCATT
TTGTAGAACAAAAATGCAACGCGAGAGCGCTAATTTTTCAAACAAAGAATCTGAG
CTGCATTTTTACAGAACAGAAATGCAACGCGAAAGCGCTATTTTACCAACGAAGA
ATCTGTGCTTCATTTTTGTAAAACAAAAATGCAACGCGAGAGCGCTAATTTTTCAA
ACAAAGAATCTGAGCTGCATTTTTACAGAACAGAAATGCAACGCGAGAGCGCTAT
TTTACCAACAAAGAATCTATACTTCTTTTTTGTTCTACAAAAATGCATCCCGAGAGC
GCTATTTTTCTAACAAAGCATCTTAGATTACTTTTTTTCTCCTTTGTGCGCTCTATAA
TGCAGTCTCTTGATAACTTTTTGCACTGTAGGTCCGTTAAGGTTAGAAGAAGGCTA
CTTTGGTGTCTATTTTCTCTTCCATAAAAAAAGCCTGACTCCACTTCCCGCGTTTAC
TGATTACTAGCGAAGCTGCGGGTGCATTTTTTCAAGATAAAGGCATCCCCGATTATA
TTCTATACCGATGTGGATTGCGCATACTTTGTGAACAGAAAGTGATAGCGTTGATG
ATTCTTCATTGGTCAGAAAATTATGAACGGTTTCTTCTATTTTGTCTCTATATACTAC
GTATAGGAAATGTTTACATTTTCGTATTGTTTTCGATTCACTCTATGAATAGTTCTTA
CTACAATTTTTTTGTCTAAAGAGTAATACTAGAGATAAACATAAAAAATGTAGAGG
TCGAGTTTAGATGCAAGTTCAAGGAGCGAAAGGTGGATGGGTAGGTTATATAGGG
ATATAGCACAGAGATATATAGCAAAGAGATACTTTTGAGCAATGTTTGTGGAAGCG
GTATTCGCAATATTTTAGTAGCTCGTTACAGTCCGGTGCGTTTTTGGTTTTTTGAAA
GTGCGTCTTCAGAGCGCTTTTGGTTTTCAAAAGCGCTCTGAAGTTCCTATACTTTC
TAGAGAATAGGAACTTCGGAATAGGAACTTCAAAGCGTTTCCGAAAACGAGCGCT
TCCGAAAATGCAACGCGAGCTGCGCACATACAGCTCACTGTTCACGTCGCACCTA
TATCTGCGTGTTGCCTGTATATATATATACATGAGAAGAACGGCATAGTGCGTGTTTA
TGCTTAAATGCGTACTTATATGCGTCTATTTATGTAGGATGAAAGGTAGTCTAGTAC
CTCCTGTGATATTATCCCATTCCATGCGGGGTATCGTATGCTTCCTTCAGCACTACCC
TTTAGCTGTTCTATATGCTGCCACTCCTCAATTGGATTAGTCTCATCCTTCAATGCTA
TCATTTCCTTTGATATTGGATCATACTAAGAAACCATTATTATCATGACATTAACCTA
TAAAAATAGGCGTATCACGAGGCCCTTTCGTCTCGCGCGTTTCGGTGATGACGGTG
AAAACCTCTGACACATGCAGCTCCCGGAGACGGTCACAGCTTGTCTGTAAGCGGA
TGCCGGGAGCAGACAAGCCCGTCAGGGCGCGTCAGCGGGTGTTGGCGGGTGTCG
GGGCTGGCTTAACTATGCGGCATCAGAGCAGATTGTACTGAGAGTGCACCATATCG
ACTACGTCGTAAGGCCGTTTCTGACAGAGTAAAATTCTTGAGGGAACTTTCACCAT
TATGGGAAATGCTTCAAGAAGGTATTGACTTAAACTCCATCAAATGGTCAGGTCAT
TGAGTGTTTTTTATTTGTTGTATTTTTTTTTTTTTAGAGAAAATCCTCCAATATCAAA
TTAGGAATCGTAGTTTCATGATTTTCTGTTACACCTAACTTTTTGTGTGGTGCCCTC
CTCCTTGTCAATATTAATGTTAAAGTGCAATTCTTTTTCCTTATCACGTTGAGCCATT
AGTATCAATTTGCTTACCTGTATTCCTTTACTATCCTCCTTTTTCTCCTTCTTGATAA
ATGTATGTAGATTGCGTATATAGTTTCGTCTACCCTATGAACATATTCCATTTTGTAAT
TTCGTGTCGTTTCTATTATGAATTTCATTTATAAAGTTTATGTACAAATATCATAAAA
AAAGAGAATCTTTTTAAGCAAGGATTTTCTTAACTTCTTCGGCGACAGCATCACCG
ACTTCGGTGGTACTGTTGGAACCACCTAAATCACCAGTTCTGATACCTGCATCCAA
AACCTTTTTAACTGCATCTTCAATGGCCTTACCTTCTTCAGGCAAGTTCAATGACA
ATTTCAACATCATTGCAGCAGACAAGATAGTGGCGATAGGGTCAACCTTATTCTTT
GGCAAATCTGGAGCAGAACCGTGGCATGGTTCGTACAAACCAAATGCGGTGTTCT
TGTCTGGCAAAGAGGCCAAGGACGCAGATGGCAACAAACCCAAGGAACCTGGGA
TAACGGAGGCTTCATCGGAGATGATATCACCAAACATGTTGCTGGTGATTATAATAC
CATTTAGGTGGGTTGGGTTCTTAACTAGGATCATGGCGGCAGAATCAATCAATTGA
TGTTGAACCTTCAATGTAGGGAATTCGTTCTTGATGGTTTCCTCCACAGTTTTTCTC
CATAATCTTGAAGAGGCCAAAAGATTAGCTTTATCCAAGGACCAAATAGGCAATGG
TGGCTCATGTTGTAGGGCCATGAAAGCGGCCATTCTTGTGATTCTTTGCACTTCTG
GAACGGTGTATTGTTCACTATCCCAAGCGACACCATCACCATCGTCTTCCTTTCTCT
TACCAAAGTAAATACCTCCCACTAATTCTCTGACAACAACGAAGTCAGTACCTTTA
GCAAATTGTGGCTTGATTGGAGATAAGTCTAAAAGAGAGTCGGATGCAAAGTTAC
ATGGTCTTAAGTTGGCGTACAATTGAAGTTCTTTACGGATTTTTAGTAAACCTTGTT
CAGGTCTAACACTACCGGTACCCCATTTAGGACCAGCCACAGCACCTAACAAAAC
GGCATCAACCTTCTTGGAGGCTTCCAGCGCCTCATCTGGAAGTGGGACACCTGTA
GCATCGATAGCAGCACCACCAATTAAATGATTTTCGAAATCGAACTTGACATTGGA
ACGAACATCAGAAATAGCTTTAAGAACCTTAATGGCTTCGGCTGTGATTTCTTGAC
CAACGTGGTCACCTGGCAAAACGACGATCTTCTTAGGGGCAGACATAGGGGCAG
ACATTAGAATGGTATATCCTTGAAATATATATATATATTGCTGAAATGTAAAAGGTAA
GAAAAGTTAGAAAGTAAGACGATTGCTAACCACCTATTGGAAAAAACAATAGGTC
CTTAAATAATATTGTCAACTTCAAGTATTGTGATGCAAGCATTTAGTCATGAACGCT
TCTCTATTCTATATGAAAAGCCGGTTCCGGCCTCTCACCTTTCCTTTTTCTCCCAATT
TTTCAGTTGAAAAAGGTATATGCGTCAGGCGACCTCTGAAATTAACAAAAAATTTC
CAGTCATCGAATTTGATTCTGTGCGATAGCGCCCCTGTGTGTTCTCGTTATGTTGAG
GAAAAAAATAATGGTTGCTAAGAGATTCGAACTCTTGCATCTTACGATACCTGAGT
ATTCCCACAGTTAACTGCGGTCAAGATATTTCTTGAATCAGGCGCCTTAGACCGCT
CGGCCAAACAACCAATTACTTGTTGAGAAATAGAGTATAATTATCCTATAAATATAA
CGTTTTTGAACACACATGAACAAGGAAGTACAGGACAATTGATTTTGAAGAGAAT
GTGGATTTTGATGTAATTGTTGGGATTCCATTTTTAATAAGGCAATAATATTAGGTAT
GTGGATATACTAGAAGTTCTCCTCGACCGTCGATATGCGGTGTGAAATACCGCACA
GATGCGTAAGGAGAAAATACCGCATCAGGAAATTGTAAACGTTAATATTTTGTTAA
AATTCGCGTTAAATTTTTGTTAAATCAGCTCATTTTTTAACCAATAGGCCGAAATCG
GCAAAATCCCTTATAAATCAAAAGAATAGACCGAGATAGGGTTGAGTGTTGTTCCA
GTTTGGAACAAGAGTCCACTATTAAAGAACGTGGACTCCAACGTCAAAGGGCGA
AAAACCGTCTATCAGGGCGATGGCCCACTACGTGAACCATCACCCTAATCAAGTTT
TTTGGGGTCGAGGTGCCGTAAAGCACTAAATCGGAACCCTAAAGGGAGCCCCCGA
TTTAGAGCTTGACGGGGAAAGCCGGCGAACGTGGCGAGAAAGGAAGGGAAGAA
AGCGAAAGGAGCGGGCGCTAGGGCGCTGGCAAGTGTAGCGGTCACGCTGCGCGT
AACCACCACACCCGCCGCGCTTAATGCGCCGCTACAGGGCGCGTCGCGCCATTCG
CCATTCAGGCTGCGCAACTGTTGGGAAGGGCGATCGGTGCGGGCCTCTTCGCTAT
TACGCCAGCTGGCGAAAGGGGGATGTGCTGCAAGGCGATTAAGTTGGGTAACGCC
AGGGTTTTCCCAGTCACGACGTTGTAAAACGACGGCCAGTGAGCGCGCGTAATAC
GACTCACTATAGGGCGAATTGGGTACCGGGCCCCCCCTCGAGGTCGACGGTATCG
ATAAGCTTGATATCGAATTCCTGCAGCCCGGGGGATCCGTTAGAATCATTTTGAATA
AAAAACACGCTTTTTCAGTTCGAGTTTATCATTATCAATACTGCCATTTCAAAGAAT
ACGTAAATAATTAATAGTAGTGATTTTCCTAACTTTATTTAGTCAAAAAATTAGCCTT
TTAATTCTGCTGTAACCCGTACATGCCCAAAATAGGGGGCGGGTTACACAGAATAT
ATAACATCGTAGGTGTCTGGGTGAACAGTTTATTCCTGGCATCCACTAAATATAATG
GAGCCCGCTTTTTAAGCTGGCATCCAGAAAAAAAAAGAATCCCAGCACCAAAATA
TTGTTTTCTTCACCAACCATCAGTTCATAGGTCCATTCTCTTAGCGCAACTACAGAG
AACAGGGGCACAAACAGGCAAAAAACGGGCACAACCTCAATGGAGTGATGCAA
CCTGCCTGGAGTAAATGATGACACAAGGCAATTGACCCACGCATGTATCTATCTCA
TTTTCTTACACCTTCTATTACCTTCTGCTCTCTCTGATTTGGAAAAAGCTGAAAAAA
AAGGTTGAAACCAGTTCCCTGAAATTATTCCCCTACTTGACTAATAAGTATATAAAG
ACGGTAGGTATTGATTGTAATTCTGTAAATCTATTTCTTAAACTTCTTAAATTCTACT
TTTATAGTTAGTCTTTTTTTTAGTTTTAAAACACCAAGAACTTAGTTTCGAATAAAC
ACACATAAACAAACAAAGAATTC
KEY:
GFP open reading frame
Linker containing stop codon +1 frameshift, or −1 frameshift
mCherry open reading frame
Plasmid backbone (containing the GPD promoter, Leu2 marker, and AmpR)
Protospacer (underlined)
PAM (boldfaced)
DNA sequences of mammalian prime editor plasmids and example
PEgRNA plasmid
pCMV-PE1:
(SEQ ID NO: 733)
ATGAAACGGACAGCCGACGGAAGCGAGTTCGAGTCACCAAAGAAGAAGCGGAA
AGTCGACAAGAAGTACAGCATCGGCCTGGACATCGGCACCAACTCTGTGGGCTGG
GCCGTGATCACCGACGAGTACAAGGTGCCCAGCAAGAAATTCAAGGTGCTGGGC
AACACCGACCGGCACAGCATCAAGAAGAACCTGATCGGAGCCCTGCTGTTCGAC
AGCGGCGAAACAGCCGAGGCCACCCGGCTGAAGAGAACCGCCAGAAGAAGATA
CACCAGACGGAAGAACCGGATCTGCTATCTGCAAGAGATCTTCAGCAACGAGATG
GCCAAGGTGGACGACAGCTTCTTCCACAGACTGGAAGAGTCCTTCCTGGTGGAA
GAGGATAAGAAGCACGAGCGGCACCCCATCTTCGGCAACATCGTGGACGAGGTG
GCCTACCACGAGAAGTACCCCACCATCTACCACCTGAGAAAGAAACTGGTGGACA
GCACCGACAAGGCCGACCTGCGGCTGATCTATCTGGCCCTGGCCCACATGATCAA
GTTCCGGGGCCACTTCCTGATCGAGGGCGACCTGAACCCCGACAACAGCGACGT
GGACAAGCTGTTCATCCAGCTGGTGCAGACCTACAACCAGCTGTTCGAGGAAAAC
CCCATCAACGCCAGCGGCGTGGACGCCAAGGCCATCCTGTCTGCCAGACTGAGCA
AGAGCAGACGGCTGGAAAATCTGATCGCCCAGCTGCCCGGCGAGAAGAAGAATG
GCCTGTTCGGAAACCTGATTGCCCTGAGCCTGGGCCTGACCCCCAACTTCAAGAG
CAACTTCGACCTGGCCGAGGATGCCAAACTGCAGCTGAGCAAGGACACCTACGA
CGACGACCTGGACAACCTGCTGGCCCAGATCGGCGACCAGTACGCCGACCTGTTT
CTGGCCGCCAAGAACCTGTCCGACGCCATCCTGCTGAGCGACATCCTGAGAGTGA
ACACCGAGATCACCAAGGCCCCCCTGAGCGCCTCTATGATCAAGAGATACGACGA
GCACCACCAGGACCTGACCCTGCTGAAAGCTCTCGTGCGGCAGCAGCTGCCTGA
GAAGTACAAAGAGATTTTCTTCGACCAGAGCAAGAACGGCTACGCCGGCTACATT
GACGGCGGAGCCAGCCAGGAAGAGTTCTACAAGTTCATCAAGCCCATCCTGGAA
AAGATGGACGGCACCGAGGAACTGCTCGTGAAGCTGAACAGAGAGGACCTGCTG
CGGAAGCAGCGGACCTTCGACAACGGCAGCATCCCCCACCAGATCCACCTGGGA
GAGCTGCACGCCATTCTGCGGCGGCAGGAAGATTTTTACCCATTCCTGAAGGACA
ACCGGGAAAAGATCGAGAAGATCCTGACCTTCCGCATCCCCTACTACGTGGGCCC
TCTGGCCAGGGGAAACAGCAGATTCGCCTGGATGACCAGAAAGAGCGAGGAAAC
CATCACCCCCTGGAACTTCGAGGAAGTGGTGGACAAGGGCGCTTCCGCCCAGAG
CTTCATCGAGCGGATGACCAACTTCGATAAGAACCTGCCCAACGAGAAGGTGCTG
CCCAAGCACAGCCTGCTGTACGAGTACTTCACCGTGTATAACGAGCTGACCAAAG
TGAAATACGTGACCGAGGGAATGAGAAAGCCCGCCTTCCTGAGCGGCGAGCAGA
AAAAGGCCATCGTGGACCTGCTGTTCAAGACCAACCGGAAAGTGACCGTGAAGC
AGCTGAAAGAGGACTACTTCAAGAAAATCGAGTGCTTCGACTCCGTGGAAATCTC
CGGCGTGGAAGATCGGTTCAACGCCTCCCTGGGCACATACCACGATCTGCTGAAA
ATTATCAAGGACAAGGACTTCCTGGACAATGAGGAAAACGAGGACATTCTGGAAG
ATATCGTGCTGACCCTGACACTGTTTGAGGACAGAGAGATGATCGAGGAACGGCT
GAAAACCTATGCCCACCTGTTCGACGACAAAGTGATGAAGCAGCTGAAGCGGCG
GAGATACACCGGCTGGGGCAGGCTGAGCCGGAAGCTGATCAACGGCATCCGGGA
CAAGCAGTCCGGCAAGACAATCCTGGATTTCCTGAAGTCCGACGGCTTCGCCAAC
AGAAACTTCATGCAGCTGATCCACGACGACAGCCTGACCTTTAAAGAGGACATCC
AGAAAGCCCAGGTGTCCGGCCAGGGCGATAGCCTGCACGAGCACATTGCCAATCT
GGCCGGCAGCCCCGCCATTAAGAAGGGCATCCTGCAGACAGTGAAGGTGGTGGA
CGAGCTCGTGAAAGTGATGGGCCGGCACAAGCCCGAGAACATCGTGATCGAAAT
GGCCAGAGAGAACCAGACCACCCAGAAGGGACAGAAGAACAGCCGCGAGAGAA
TGAAGCGGATCGAAGAGGGCATCAAAGAGCTGGGCAGCCAGATCCTGAAAGAAC
ACCCCGTGGAAAACACCCAGCTGCAGAACGAGAAGCTGTACCTGTACTACCTGCA
GAATGGGCGGGATATGTACGTGGACCAGGAACTGGACATCAACCGGCTGTCCGAC
TACGATGTGGACGCTATCGTGCCTCAGAGCTTTCTGAAGGACGACTCCATCGACA
ACAAGGTGCTGACCAGAAGCGACAAGAACCGGGGCAAGAGCGACAACGTGCCC
TCCGAAGAGGTCGTGAAGAAGATGAAGAACTACTGGCGGCAGCTGCTGAACGCC
AAGCTGATTACCCAGAGAAAGTTCGACAATCTGACCAAGGCCGAGAGAGGCGGC
CTGAGCGAACTGGATAAGGCCGGCTTCATCAAGAGACAGCTGGTGGAAACCCGG
CAGATCACAAAGCACGTGGCACAGATCCTGGACTCCCGGATGAACACTAAGTACG
ACGAGAATGACAAGCTGATCCGGGAAGTGAAAGTGATCACCCTGAAGTCCAAGC
TGGTGTCCGATTTCCGGAAGGATTTCCAGTTTTACAAAGTGCGCGAGATCAACAA
CTACCACCACGCCCACGACGCCTACCTGAACGCCGTCGTGGGAACCGCCCTGATC
AAAAAGTACCCTAAGCTGGAAAGCGAGTTCGTGTACGGCGACTACAAGGTGTACG
ACGTGCGGAAGATGATCGCCAAGAGCGAGCAGGAAATCGGCAAGGCTACCGCCA
AGTACTTCTTCTACAGCAACATCATGAACTTTTTCAAGACCGAGATTACCCTGGCC
AACGGCGAGATCCGGAAGCGGCCTCTGATCGAGACAAACGGCGAAACCGGGGAG
ATCGTGTGGGATAAGGGCCGGGATTTTGCCACCGTGCGGAAAGTGCTGAGCATGC
CCCAAGTGAATATCGTGAAAAAGACCGAGGTGCAGACAGGCGGCTTCAGCAAAG
AGTCTATCCTGCCCAAGAGGAACAGCGATAAGCTGATCGCCAGAAAGAAGGACT
GGGACCCTAAGAAGTACGGCGGCTTCGACAGCCCCACCGTGGCCTATTCTGTGCT
GGTGGTGGCCAAAGTGGAAAAGGGCAAGTCCAAGAAACTGAAGAGTGTGAAAG
AGCTGCTGGGGATCACCATCATGGAAAGAAGCAGCTTCGAGAAGAATCCCATCGA
CTTTCTGGAAGCCAAGGGCTACAAAGAAGTGAAAAAGGACCTGATCATCAAGCT
GCCTAAGTACTCCCTGTTCGAGCTGGAAAACGGCCGGAAGAGAATGCTGGCCTCT
GCCGGCGAACTGCAGAAGGGAAACGAACTGGCCCTGCCCTCCAAATATGTGAAC
TTCCTGTACCTGGCCAGCCACTATGAGAAGCTGAAGGGCTCCCCCGAGGATAATG
AGCAGAAACAGCTGTTTGTGGAACAGCACAAGCACTACCTGGACGAGATCATCG
AGCAGATCAGCGAGTTCTCCAAGAGAGTGATCCTGGCCGACGCTAATCTGGACAA
AGTGCTGTCCGCCTACAACAAGCACCGGGATAAGCCCATCAGAGAGCAGGCCGA
GAATATCATCCACCTGTTTACCCTGACCAATCTGGGAGCCCCTGCCGCCTTCAAGT
ACTTTGACACCACCATCGACCGGAAGAGGTACACCAGCACCAAAGAGGTGCTGG
ACGCCACCCTGATCCACCAGAGCATCACCGGCCTGTACGAGACACGGATCGACCT
GTCTCAGCTGGGAGGTGACTCTGGAGGATCTAGCGGAGGATCCTCTGGCAGCGAGA
CACCAGGAACAAGCGAGTCAGCAACACCAGAGAGCAGTGGCGGCAGCAGCGGCGGC
AGCAGCACCCTAAATATAGAAGATGAGTATCGGCTACATGAGACCTCAAAAGA
GCCAGATGTTTCTCTAGGGTCCACATGGCTGTCTGATTTTCCTCAGGCCTGG
GCGGAAACCGGGGGCATGGGACTGGCAGTTCGCCAAGCTCCTCTGATCATA
CCTCTGAAAGCAACCTCTACCCCCGTGTCCATAAAACAATACCCCATGTCACA
AGAAGCCAGACTGGGGATCAAGCCCCACATACAGAGACTGTTGGACCAGGG
AATACTGGTACCCTGCCAGTCCCCCTGGAACACGCCCCTGCTACCCGTTAAG
AAACCAGGGACTAATGATTATAGGCCTGTCCAGGATCTGAGAGAAGTCAACA
AGCGGGTGGAAGACATCCACCCCACCGTGCCCAACCCTTACAACCTCTTGAG
CGGGCTCCCACCGTCCCACCAGTGGTACACTGTGCTTGATTTAAAGGATGCC
TTTTTCTGCCTGAGACTCCACCCCACCAGTCAGCCTCTCTTCGCCTTTGAGT
GGAGAGATCCAGAGATGGGAATCTCAGGACAATTGACCTGGACCAGACTCC
CACAGGGTTTCAAAAACAGTCCCACCCTGTTTGATGAGGCACTGCACAGAGA
CCTAGCAGACTTCCGGATCCAGCACCCAGACTTGATCCTGCTACAGTACGTG
GATGACTTACTGCTGGCCGCCACTTCTGAGCTAGACTGCCAACAAGGTACTC
GGGCCCTGTTACAAACCCTAGGGAACCTCGGGTATCGGGCCTCGGCCAAGA
AAGCCCAAATTTGCCAGAAACAGGTCAAGTATCTGGGGTATCTTCTAAAAGA
GGGTCAGAGATGGCTGACTGAGGCCAGAAAAGAGACTGTGATGGGGCAGCC
TACTCCGAAGACCCCTCGACAACTAAGGGAGTTCCTAGGGACGGCAGGCTT
CTGTCGCCTCTGGATCCCTGGGTTTGCAGAAATGGCAGCCCCCCTGTACCCT
CTCACCAAAACGGGGACTCTGTTTAATTGGGGCCCAGACCAACAAAAGGCCT
ATCAAGAAATCAAGCAAGCTCTTCTAACTGCCCCAGCCCTGGGGTTGCCAGA
TTTGACTAAGCCCTTTGAACTCTTTGTCGACGAGAAGCAGGGCTACGCCAAA
GGTGTCCTAACGCAAAAACTGGGACCTTGGCGTCGGCCGGTGGCCTACCTG
TCCAAAAAGCTAGACCCAGTAGCAGCTGGGTGGCCCCCTTGCCTACGGATGG
TAGCAGCCATTGCCGTACTGACAAAGGATGCAGGCAAGCTAACCATGGGACA
GCCACTAGTCATTCTGGCCCCCCATGCAGTAGAGGCACTAGTCAAACAACCC
CCCGACCGCTGGCTTTCCAACGCCCGGATGACTCACTATCAGGCCTTGCTTT
TGGACACGGACCGGGTCCAGTTCGGACCGGTGGTAGCCCTGAACCCGGCTA
CGCTGCTCCCACTGCCTGAGGAAGGGCTGCAACACAACTGCCTTGATATCCT
GGCCGAAGCCCACGGAACCCGACCCGACCTAACGGACCAGCCGCTCCCAGA
CGCCGACCACACCTGGTACACGGATGGAAGCAGTCTCTTACAAGAGGGACA
GCGTAAGGCGGGAGCTGCGGTGACCACCGAGACCGAGGTAATCTGGGCTAA
AGCCCTGCCAGCCGGGACATCCGCTCAGCGGGCTGAACTGATAGCACTCAC
CCAGGCCCTAAAGATGGCAGAAGGTAAGAAGCTAAATGTTTATACTGATAGC
CGTTATGCTTTTGCTACTGCCCATATCCATGGAGAAATATACAGAAGGCGTGG
GTTGCTCACATCAGAAGGCAAAGAGATCAAAAATAAAGACGAGATCTTGGCC
CTACTAAAAGCCCTCTTTCTGCCCAAAAGACTTAGCATAATCCATTGTCCAGG
ACATCAAAAGGGACACAGCGCCGAGGCTAGAGGCAACCGGATGGCTGACCA
AGCGGCCCGAAAGGCAGCCATCACAGAGACTCCAGACACCTCTACCCTCCT
CATAGAAAATTCATCACCCTCTGGCGGCTCAAAAAGAACCGCCGACGGCAGC
GAATTCGAGCCCAAGAAGAAGAGGAAAGTCTAACCGGTCATCATCACCATCAC
CATTGAGTTTAAACCCGCTGATCAGCCTCGACTGTGCCTTCTAGTTGCCAGCCATC
TGTTGTTTGCCCCTCCCCCGTGCCTTCCTTGACCCTGGAAGGTGCCACTCCCACTG
TCCTTTCCTAATAAAATGAGAAAATTGCATCGCATTGTCTGAGTAGGTGTCATTCTA
TTCTGGGGGGTGGGGTGGGGCAGGACAGCAAGGGGGAGGATTGGGAAGACAATA
GCAGGCATGCTGGGGATGCGGTGGGCTCTATGGCTTCTGAGGCGGAAAGAACCAG
CTGGGGCTCGATACCGTCGACCTCTAGCTAGAGCTTGGCGTAATCATGGTCATAGC
TGTTTCCTGTGTGAAATTGTTATCCGCTCACAATTCCACACAACATACGAGCCGGA
AGCATAAAGTGTAAAGCCTAGGGTGCCTAATGAGTGAGCTAACTCACATTAATTGC
GTTGCGCTCACTGCCCGCTTTCCAGTCGGGAAACCTGTCGTGCCAGCTGCATTAAT
GAATCGGCCAACGCGCGGGGAGAGGCGGTTTGCGTATTGGGCGCTCTTCCGCTTC
CTCGCTCACTGACTCGCTGCGCTCGGTCGTTCGGCTGCGGCGAGCGGTATCAGCT
CACTCAAAGGCGGTAATACGGTTATCCACAGAATCAGGGGATAACGCAGGAAAGA
ACATGTGAGCAAAAGGCCAGCAAAAGGCCAGGAACCGTAAAAAGGCCGCGTTGC
TGGCGTTTTTCCATAGGCTCCGCCCCCCTGACGAGCATCACAAAAATCGACGCTCA
AGTCAGAGGTGGCGAAACCCGACAGGACTATAAAGATACCAGGCGTTTCCCCCTG
GAAGCTCCCTCGTGCGCTCTCCTGTTCCGACCCTGCCGCTTACCGGATACCTGTCC
GCCTTTCTCCCTTCGGGAAGCGTGGCGCTTTCTCATAGCTCACGCTGTAGGTATCT
CAGTTCGGTGTAGGTCGTTCGCTCCAAGCTGGGCTGTGTGCACGAACCCCCCGTT
CAGCCCGACCGCTGCGCCTTATCCGGTAACTATCGTCTTGAGTCCAACCCGGTAAG
ACACGACTTATCGCCACTGGCAGCAGCCACTGGTAACAGGATTAGCAGAGCGAGG
TATGTAGGCGGTGCTACAGAGTTCTTGAAGTGGTGGCCTAACTACGGCTACACTAG
AAGAACAGTATTTGGTATCTGCGCTCTGCTGAAGCCAGTTACCTTCGGAAAAAGA
GTTGGTAGCTCTTGATCCGGCAAACAAACCACCGCTGGTAGCGGTGGTTTTTTTGT
TTGCAAGCAGCAGATTACGCGCAGAAAAAAAGGATCTCAAGAAGATCCTTTGATC
TTTTCTACGGGGTCTGACGCTCAGTGGAACGAAAACTCACGTTAAGGGATTTTGG
TCATGAGATTATCAAAAAGGATCTTCACCTAGATCCTTTTAAATTAAAAATGAAGTT
TTAAATCAATCTAAAGTATATATGAGTAAACTTGGTCTGACAGTTACCAATGCTTAA
TCAGTGAGGCACCTATCTCAGCGATCTGTCTATTTCGTTCATCCATAGTTGCCTGAC
TCCCCGTCGTGTAGATAACTACGATACGGGAGGGCTTACCATCTGGCCCCAGTGCT
GCAATGATACCGCGAGACCCACGCTCACCGGCTCCAGATTTATCAGCAATAAACCA
GCCAGCCGGAAGGGCCGAGCGCAGAAGTGGTCCTGCAACTTTATCCGCCTCCATC
CAGTCTATTAATTGTTGCCGGGAAGCTAGAGTAAGTAGTTCGCCAGTTAATAGTTT
GCGCAACGTTGTTGCCATTGCTACAGGCATCGTGGTGTCACGCTCGTCGTTTGGTA
TGGCTTCATTCAGCTCCGGTTCCCAACGATCAAGGCGAGTTACATGATCCCCCATG
TTGTGCAAAAAAGCGGTTAGCTCCTTCGGTCCTCCGATCGTTGTCAGAAGTAAGT
TGGCCGCAGTGTTATCACTCATGGTTATGGCAGCACTGCATAATTCTCTTACTGTCA
TGCCATCCGTAAGATGCTTTTCTGTGACTGGTGAGTACTCAACCAAGTCATTCTGA
GAATAGTGTATGCGGCGACCGAGTTGCTCTTGCCCGGCGTCAATACGGGATAATAC
CGCGCCACATAGCAGAACTTTAAAAGTGCTCATCATTGGAAAACGTTCTTCGGGG
CGAAAACTCTCAAGGATCTTACCGCTGTTGAGATCCAGTTCGATGTAACCCACTCG
TGCACCCAACTGATCTTCAGCATCTTTTACTTTCACCAGCGTTTCTGGGTGAGCAA
AAACAGGAAGGCAAAATGCCGCAAAAAAGGGAATAAGGGCGACACGGAAATGTT
GAATACTCATACTCTTCCTTTTTCAATATTATTGAAGCATTTATCAGGGTTATTGTCT
CATGAGCGGATACATATTTGAATGTATTTAGAAAAATAAACAAATAGGGGTTCCGC
GCACATTTCCCCGAAAAGTGCCACCTGACGTCGACGGATCGGGAGATCGATCTCC
CGATCCCCTAGGGTCGACTCTCAGTACAATCTGCTCTGATGCCGCATAGTTAAGCC
AGTATCTGCTCCCTGCTTGTGTGTTGGAGGTCGCTGAGTAGTGCGCGAGCAAAATT
TAAGCTACAACAAGGCAAGGCTTGACCGACAATTGCATGAAGAATCTGCTTAGGG
TTAGGCGTTTTGCGCTGCTTCGCGATGTACGGGCCAGATATACGCGTTGACATTGA
TTATTGACTAGTTATTAATAGTAATCAATTACGGGGTCATTAGTTCATAGCCCATATA
TGGAGTTCCGCGTTACATAACTTACGGTAAATGGCCCGCCTGGCTGACCGCCCAAC
GACCCCCGCCCATTGACGTCAATAATGACGTATGTTCCCATAGTAACGCCAATAGG
GACTTTCCATTGACGTCAATGGGTGGAGTATTTACGGTAAACTGCCCACTTGGCAG
TACATCAAGTGTATCATATGCCAAGTACGCCCCCTATTGACGTCAATGACGGTAAAT
GGCCCGCCTGGCATTATGCCCAGTACATGACCTTATGGGACTTTCCTACTTGGCAG
TACATCTACGTATTAGTCATCGCTATTACCATGGTGATGCGGTTTTGGCAGTACATC
AATGGGCGTGGATAGCGGTTTGACTCACGGGGATTTCCAAGTCTCCACCCCATTGA
CGTCAATGGGAGTTTGTTTTGGCACCAAAATCAACGGGACTTTCCAAAATGTCGT
AACAACTCCGCCCCATTGACGCAAATGGGCGGTAGGCGTGTACGGTGGGAGGTCT
ATATAAGCAGAGCTGGTTTAGTGAACCGTCAGATCCGCTAGAGATCCGCGGCCGCT
AATACGACTCACTATAGGGAGAGCCGCCACC
pCMV-PE2:
(SEQ ID NO: 734)
ATGAAACGGACAGCCGACGGAAGCGAGTTCGAGTCACCAAAGAAGAAGCGGAA
AGTCGACAAGAAGTACAGCATCGGCCTGGACATCGGCACCAACTCTGTGGGCTGG
GCCGTGATCACCGACGAGTACAAGGTGCCCAGCAAGAAATTCAAGGTGCTGGGC
AACACCGACCGGCACAGCATCAAGAAGAACCTGATCGGAGCCCTGCTGTTCGAC
AGCGGCGAAACAGCCGAGGCCACCCGGCTGAAGAGAACCGCCAGAAGAAGATA
CACCAGACGGAAGAACCGGATCTGCTATCTGCAAGAGATCTTCAGCAACGAGATG
GCCAAGGTGGACGACAGCTTCTTCCACAGACTGGAAGAGTCCTTCCTGGTGGAA
GAGGATAAGAAGCACGAGCGGCACCCCATCTTCGGCAACATCGTGGACGAGGTG
GCCTACCACGAGAAGTACCCCACCATCTACCACCTGAGAAAGAAACTGGTGGACA
GCACCGACAAGGCCGACCTGCGGCTGATCTATCTGGCCCTGGCCCACATGATCAA
GTTCCGGGGCCACTTCCTGATCGAGGGCGACCTGAACCCCGACAACAGCGACGT
GGACAAGCTGTTCATCCAGCTGGTGCAGACCTACAACCAGCTGTTCGAGGAAAAC
CCCATCAACGCCAGCGGCGTGGACGCCAAGGCCATCCTGTCTGCCAGACTGAGCA
AGAGCAGACGGCTGGAAAATCTGATCGCCCAGCTGCCCGGCGAGAAGAAGAATG
GCCTGTTCGGAAACCTGATTGCCCTGAGCCTGGGCCTGACCCCCAACTTCAAGAG
CAACTTCGACCTGGCCGAGGATGCCAAACTGCAGCTGAGCAAGGACACCTACGA
CGACGACCTGGACAACCTGCTGGCCCAGATCGGCGACCAGTACGCCGACCTGTTT
CTGGCCGCCAAGAACCTGTCCGACGCCATCCTGCTGAGCGACATCCTGAGAGTGA
ACACCGAGATCACCAAGGCCCCCCTGAGCGCCTCTATGATCAAGAGATACGACGA
GCACCACCAGGACCTGACCCTGCTGAAAGCTCTCGTGCGGCAGCAGCTGCCTGA
GAAGTACAAAGAGATTTTCTTCGACCAGAGCAAGAACGGCTACGCCGGCTACATT
GACGGCGGAGCCAGCCAGGAAGAGTTCTACAAGTTCATCAAGCCCATCCTGGAA
AAGATGGACGGCACCGAGGAACTGCTCGTGAAGCTGAACAGAGAGGACCTGCTG
CGGAAGCAGCGGACCTTCGACAACGGCAGCATCCCCCACCAGATCCACCTGGGA
GAGCTGCACGCCATTCTGCGGCGGCAGGAAGATTTTTACCCATTCCTGAAGGACA
ACCGGGAAAAGATCGAGAAGATCCTGACCTTCCGCATCCCCTACTACGTGGGCCC
TCTGGCCAGGGGAAACAGCAGATTCGCCTGGATGACCAGAAAGAGCGAGGAAAC
CATCACCCCCTGGAACTTCGAGGAAGTGGTGGACAAGGGCGCTTCCGCCCAGAG
CTTCATCGAGCGGATGACCAACTTCGATAAGAACCTGCCCAACGAGAAGGTGCTG
CCCAAGCACAGCCTGCTGTACGAGTACTTCACCGTGTATAACGAGCTGACCAAAG
TGAAATACGTGACCGAGGGAATGAGAAAGCCCGCCTTCCTGAGCGGCGAGCAGA
AAAAGGCCATCGTGGACCTGCTGTTCAAGACCAACCGGAAAGTGACCGTGAAGC
AGCTGAAAGAGGACTACTTCAAGAAAATCGAGTGCTTCGACTCCGTGGAAATCTC
CGGCGTGGAAGATCGGTTCAACGCCTCCCTGGGCACATACCACGATCTGCTGAAA
ATTATCAAGGACAAGGACTTCCTGGACAATGAGGAAAACGAGGACATTCTGGAAG
ATATCGTGCTGACCCTGACACTGTTTGAGGACAGAGAGATGATCGAGGAACGGCT
GAAAACCTATGCCCACCTGTTCGACGACAAAGTGATGAAGCAGCTGAAGCGGCG
GAGATACACCGGCTGGGGCAGGCTGAGCCGGAAGCTGATCAACGGCATCCGGGA
CAAGCAGTCCGGCAAGACAATCCTGGATTTCCTGAAGTCCGACGGCTTCGCCAAC
AGAAACTTCATGCAGCTGATCCACGACGACAGCCTGACCTTTAAAGAGGACATCC
AGAAAGCCCAGGTGTCCGGCCAGGGCGATAGCCTGCACGAGCACATTGCCAATCT
GGCCGGCAGCCCCGCCATTAAGAAGGGCATCCTGCAGACAGTGAAGGTGGTGGA
CGAGCTCGTGAAAGTGATGGGCCGGCACAAGCCCGAGAACATCGTGATCGAAAT
GGCCAGAGAGAACCAGACCACCCAGAAGGGACAGAAGAACAGCCGCGAGAGAA
TGAAGCGGATCGAAGAGGGCATCAAAGAGCTGGGCAGCCAGATCCTGAAAGAAC
ACCCCGTGGAAAACACCCAGCTGCAGAACGAGAAGCTGTACCTGTACTACCTGCA
GAATGGGCGGGATATGTACGTGGACCAGGAACTGGACATCAACCGGCTGTCCGAC
TACGATGTGGACGCTATCGTGCCTCAGAGCTTTCTGAAGGACGACTCCATCGACA
ACAAGGTGCTGACCAGAAGCGACAAGAACCGGGGCAAGAGCGACAACGTGCCC
TCCGAAGAGGTCGTGAAGAAGATGAAGAACTACTGGCGGCAGCTGCTGAACGCC
AAGCTGATTACCCAGAGAAAGTTCGACAATCTGACCAAGGCCGAGAGAGGCGGC
CTGAGCGAACTGGATAAGGCCGGCTTCATCAAGAGACAGCTGGTGGAAACCCGG
CAGATCACAAAGCACGTGGCACAGATCCTGGACTCCCGGATGAACACTAAGTACG
ACGAGAATGACAAGCTGATCCGGGAAGTGAAAGTGATCACCCTGAAGTCCAAGC
TGGTGTCCGATTTCCGGAAGGATTTCCAGTTTTACAAAGTGCGCGAGATCAACAA
CTACCACCACGCCCACGACGCCTACCTGAACGCCGTCGTGGGAACCGCCCTGATC
AAAAAGTACCCTAAGCTGGAAAGCGAGTTCGTGTACGGCGACTACAAGGTGTACG
ACGTGCGGAAGATGATCGCCAAGAGCGAGCAGGAAATCGGCAAGGCTACCGCCA
AGTACTTCTTCTACAGCAACATCATGAACTTTTTCAAGACCGAGATTACCCTGGCC
AACGGCGAGATCCGGAAGCGGCCTCTGATCGAGACAAACGGCGAAACCGGGGAG
ATCGTGTGGGATAAGGGCCGGGATTTTGCCACCGTGCGGAAAGTGCTGAGCATGC
CCCAAGTGAATATCGTGAAAAAGACCGAGGTGCAGACAGGCGGCTTCAGCAAAG
AGTCTATCCTGCCCAAGAGGAACAGCGATAAGCTGATCGCCAGAAAGAAGGACT
GGGACCCTAAGAAGTACGGCGGCTTCGACAGCCCCACCGTGGCCTATTCTGTGCT
GGTGGTGGCCAAAGTGGAAAAGGGCAAGTCCAAGAAACTGAAGAGTGTGAAAG
AGCTGCTGGGGATCACCATCATGGAAAGAAGCAGCTTCGAGAAGAATCCCATCGA
CTTTCTGGAAGCCAAGGGCTACAAAGAAGTGAAAAAGGACCTGATCATCAAGCT
GCCTAAGTACTCCCTGTTCGAGCTGGAAAACGGCCGGAAGAGAATGCTGGCCTCT
GCCGGCGAACTGCAGAAGGGAAACGAACTGGCCCTGCCCTCCAAATATGTGAAC
TTCCTGTACCTGGCCAGCCACTATGAGAAGCTGAAGGGCTCCCCCGAGGATAATG
AGCAGAAACAGCTGTTTGTGGAACAGCACAAGCACTACCTGGACGAGATCATCG
AGCAGATCAGCGAGTTCTCCAAGAGAGTGATCCTGGCCGACGCTAATCTGGACAA
AGTGCTGTCCGCCTACAACAAGCACCGGGATAAGCCCATCAGAGAGCAGGCCGA
GAATATCATCCACCTGTTTACCCTGACCAATCTGGGAGCCCCTGCCGCCTTCAAGT
ACTTTGACACCACCATCGACCGGAAGAGGTACACCAGCACCAAAGAGGTGCTGG
ACGCCACCCTGATCCACCAGAGCATCACCGGCCTGTACGAGACACGGATCGACCT
GTCTCAGCTGGGAGGTGACTCTGGAGGATCTAGCGGAGGATCCTCTGGCAGCGAG
ACACCAGGAACAAGCGAGTCAGCAACACCAGAGAGCAGTGGCGGCAGCAGCGG
CGGCAGCAGCACCCTAAATATAGAAGATGAGTATCGGCTACATGAGACCTCAAAA
GAGCCAGATGTTTCTCTAGGGTCCACATGGCTGTCTGATTTTCCTCAGGCCTGGGC
GGAAACCGGGGGCATGGGACTGGCAGTTCGCCAAGCTCCTCTGATCATACCTCTG
AAAGCAACCTCTACCCCCGTGTCCATAAAACAATACCCCATGTCACAAGAAGCCA
GACTGGGGATCAAGCCCCACATACAGAGACTGTTGGACCAGGGAATACTGGTACC
CTGCCAGTCCCCCTGGAACACGCCCCTGCTACCCGTTAAGAAACCAGGGACTAAT
GATTATAGGCCTGTCCAGGATCTGAGAGAAGTCAACAAGCGGGTGGAAGACATCC
ACCCCACCGTGCCCAACCCTTACAACCTCTTGAGCGGGCTCCCACCGTCCCACCA
GTGGTACACTGTGCTTGATTTAAAGGATGCCTTTTTCTGCCTGAGACTCCACCCCA
CCAGTCAGCCTCTCTTCGCCTTTGAGTGGAGAGATCCAGAGATGGGAATCTCAGG
ACAATTGACCTGGACCAGACTCCCACAGGGTTTCAAAAACAGTCCCACCCTGTTT
AATGAGGCACTGCACAGAGACCTAGCAGACTTCCGGATCCAGCACCCAGACTTGA
TCCTGCTACAGTACGTGGATGACTTACTGCTGGCCGCCACTTCTGAGCTAGACTGC
CAACAAGGTACTCGGGCCCTGTTACAAACCCTAGGGAACCTCGGGTATCGGGCCT
CGGCCAAGAAAGCCCAAATTTGCCAGAAACAGGTCAAGTATCTGGGGTATCTTCT
AAAAGAGGGTCAGAGATGGCTGACTGAGGCCAGAAAAGAGACTGTGATGGGGCA
GCCTACTCCGAAGACCCCTCGACAACTAAGGGAGTTCCTAGGGAAGGCAGGCTTC
TGTCGCCTCTTCATCCCTGGGTTTGCAGAAATGGCAGCCCCCCTGTACCCTCTCAC
CAAACCGGGGACTCTGTTTAATTGGGGCCCAGACCAACAAAAGGCCTATCAAGAA
ATCAAGCAAGCTCTTCTAACTGCCCCAGCCCTGGGGTTGCCAGATTTGACTAAGC
CCTTTGAACTCTTTGTCGACGAGAAGCAGGGCTACGCCAAAGGTGTCCTAACGCA
AAAACTGGGACCTTGGCGTCGGCCGGTGGCCTACCTGTCCAAAAAGCTAGACCC
AGTAGCAGCTGGGTGGCCCCCTTGCCTACGGATGGTAGCAGCCATTGCCGTACTG
ACAAAGGATGCAGGCAAGCTAACCATGGGACAGCCACTAGTCATTCTGGCCCCCC
ATGCAGTAGAGGCACTAGTCAAACAACCCCCCGACCGCTGGCTTTCCAACGCCCG
GATGACTCACTATCAGGCCTTGCTTTTGGACACGGACCGGGTCCAGTTCGGACCG
GTGGTAGCCCTGAACCCGGCTACGCTGCTCCCACTGCCTGAGGAAGGGCTGCAAC
ACAACTGCCTTGATATCCTGGCCGAAGCCCACGGAACCCGACCCGACCTAACGGA
CCAGCCGCTCCCAGACGCCGACCACACCTGGTACACGGATGGAAGCAGTCTCTTA
CAAGAGGGACAGCGTAAGGCGGGAGCTGCGGTGACCACCGAGACCGAGGTAATC
TGGGCTAAAGCCCTGCCAGCCGGGACATCCGCTCAGCGGGCTGAACTGATAGCAC
TCACCCAGGCCCTAAAGATGGCAGAAGGTAAGAAGCTAAATGTTTATACTGATAGC
CGTTATGCTTTTGCTACTGCCCATATCCATGGAGAAATATACAGAAGGCGTGGGTG
GCTCACATCAGAAGGCAAAGAGATCAAAAATAAAGACGAGATCTTGGCCCTACTA
AAAGCCCTCTTTCTGCCCAAAAGACTTAGCATAATCCATTGTCCAGGACATCAAAA
GGGACACAGCGCCGAGGCTAGAGGCAACCGGATGGCTGACCAAGCGGCCCGAAA
GGCAGCCATCACAGAGACTCCAGACACCTCTACCCTCCTCATAGAAAATTCATCAC
CCTCTGGCGGCTCAAAAAGAACCGCCGACGGCAGCGAATTCGAGCCCAAGAAGA
AGAGGAAAGTCTAACCGGTCATCATCACCATCACCATTGAGTTTAAACCCGCTGAT
CAGCCTCGACTGTGCCTTCTAGTTGCCAGCCATCTGTTGTTTGCCCCTCCCCCGTG
CCTTCCTTGACCCTGGAAGGTGCCACTCCCACTGTCCTTTCCTAATAAAATGAGAA
AATTGCATCGCATTGTCTGAGTAGGTGTCATTCTATTCTGGGGGGTGGGGTGGGGC
AGGACAGCAAGGGGGAGGATTGGGAAGACAATAGCAGGCATGCTGGGGATGCGG
TGGGCTCTATGGCTTCTGAGGCGGAAAGAACCAGCTGGGGCTCGATACCGTCGAC
CTCTAGCTAGAGCTTGGCGTAATCATGGTCATAGCTGTTTCCTGTGTGAAATTGTTA
TCCGCTCACAATTCCACACAACATACGAGCCGGAAGCATAAAGTGTAAAGCCTAG
GGTGCCTAATGAGTGAGCTAACTCACATTAATTGCGTTGCGCTCACTGCCCGCTTT
CCAGTCGGGAAACCTGTCGTGCCAGCTGCATTAATGAATCGGCCAACGCGCGGGG
AGAGGCGGTTTGCGTATTGGGCGCTCTTCCGCTTCCTCGCTCACTGACTCGCTGCG
CTCGGTCGTTCGGCTGCGGCGAGCGGTATCAGCTCACTCAAAGGCGGTAATACGG
TTATCCACAGAATCAGGGGATAACGCAGGAAAGAACATGTGAGCAAAAGGCCAG
CAAAAGGCCAGGAACCGTAAAAAGGCCGCGTTGCTGGCGTTTTTCCATAGGCTCC
GCCCCCCTGACGAGCATCACAAAAATCGACGCTCAAGTCAGAGGTGGCGAAACC
CGACAGGACTATAAAGATACCAGGCGTTTCCCCCTGGAAGCTCCCTCGTGCGCTCT
CCTGTTCCGACCCTGCCGCTTACCGGATACCTGTCCGCCTTTCTCCCTTCGGGAAG
CGTGGCGCTTTCTCATAGCTCACGCTGTAGGTATCTCAGTTCGGTGTAGGTCGTTC
GCTCCAAGCTGGGCTGTGTGCACGAACCCCCCGTTCAGCCCGACCGCTGCGCCTT
ATCCGGTAACTATCGTCTTGAGTCCAACCCGGTAAGACACGACTTATCGCCACTGG
CAGCAGCCACTGGTAACAGGATTAGCAGAGCGAGGTATGTAGGCGGTGCTACAGA
GTTCTTGAAGTGGTGGCCTAACTACGGCTACACTAGAAGAACAGTATTTGGTATCT
GCGCTCTGCTGAAGCCAGTTACCTTCGGAAAAAGAGTTGGTAGCTCTTGATCCGG
CAAACAAACCACCGCTGGTAGCGGTGGTTTTTTTGTTTGCAAGCAGCAGATTACG
CGCAGAAAAAAAGGATCTCAAGAAGATCCTTTGATCTTTTCTACGGGGTCTGACG
CTCAGTGGAACGAAAACTCACGTTAAGGGATTTTGGTCATGAGATTATCAAAAAG
GATCTTCACCTAGATCCTTTTAAATTAAAAATGAAGTTTTAAATCAATCTAAAGTAT
ATATGAGTAAACTTGGTCTGACAGTTACCAATGCTTAATCAGTGAGGCACCTATCT
CAGCGATCTGTCTATTTCGTTCATCCATAGTTGCCTGACTCCCCGTCGTGTAGATAA
CTACGATACGGGAGGGCTTACCATCTGGCCCCAGTGCTGCAATGATACCGCGAGA
CCCACGCTCACCGGCTCCAGATTTATCAGCAATAAACCAGCCAGCCGGAAGGGCC
GAGCGCAGAAGTGGTCCTGCAACTTTATCCGCCTCCATCCAGTCTATTAATTGTTG
CCGGGAAGCTAGAGTAAGTAGTTCGCCAGTTAATAGTTTGCGCAACGTTGTTGCC
ATTGCTACAGGCATCGTGGTGTCACGCTCGTCGTTTGGTATGGCTTCATTCAGCTC
CGGTTCCCAACGATCAAGGCGAGTTACATGATCCCCCATGTTGTGCAAAAAAGCG
GTTAGCTCCTTCGGTCCTCCGATCGTTGTCAGAAGTAAGTTGGCCGCAGTGTTATC
ACTCATGGTTATGGCAGCACTGCATAATTCTCTTACTGTCATGCCATCCGTAAGATG
CTTTTCTGTGACTGGTGAGTACTCAACCAAGTCATTCTGAGAATAGTGTATGCGGC
GACCGAGTTGCTCTTGCCCGGCGTCAATACGGGATAATACCGCGCCACATAGCAG
AACTTTAAAAGTGCTCATCATTGGAAAACGTTCTTCGGGGCGAAAACTCTCAAGG
ATCTTACCGCTGTTGAGATCCAGTTCGATGTAACCCACTCGTGCACCCAACTGATC
TTCAGCATCTTTTACTTTCACCAGCGTTTCTGGGTGAGCAAAAACAGGAAGGCAA
AATGCCGCAAAAAAGGGAATAAGGGCGACACGGAAATGTTGAATACTCATACTCT
TCCTTTTTCAATATTATTGAAGCATTTATCAGGGTTATTGTCTCATGAGCGGATACAT
ATTTGAATGTATTTAGAAAAATAAACAAATAGGGGTTCCGCGCACATTTCCCCGAA
AAGTGCCACCTGACGTCGACGGATCGGGAGATCGATCTCCCGATCCCCTAGGGTC
GACTCTCAGTACAATCTGCTCTGATGCCGCATAGTTAAGCCAGTATCTGCTCCCTG
CTTGTGTGTTGGAGGTCGCTGAGTAGTGCGCGAGCAAAATTTAAGCTACAACAAG
GCAAGGCTTGACCGACAATTGCATGAAGAATCTGCTTAGGGTTAGGCGTTTTGCG
CTGCTTCGCGATGTACGGGCCAGATATACGCGTTGACATTGATTATTGACTAGTTAT
TAATAGTAATCAATTACGGGGTCATTAGTTCATAGCCCATATATGGAGTTCCGCGTTA
CATAACTTACGGTAAATGGCCCGCCTGGCTGACCGCCCAACGACCCCCGCCCATTG
ACGTCAATAATGACGTATGTTCCCATAGTAACGCCAATAGGGACTTTCCATTGACGT
CAATGGGTGGAGTATTTACGGTAAACTGCCCACTTGGCAGTACATCAAGTGTATCA
TATGCCAAGTACGCCCCCTATTGACGTCAATGACGGTAAATGGCCCGCCTGGCATT
ATGCCCAGTACATGACCTTATGGGACTTTCCTACTTGGCAGTACATCTACGTATTAG
TCATCGCTATTACCATGGTGATGCGGTTTTGGCAGTACATCAATGGGCGTGGATAGC
GGTTTGACTCACGGGGATTTCCAAGTCTCCACCCCATTGACGTCAATGGGAGTTTG
TTTTGGCACCAAAATCAACGGGACTTTCCAAAATGTCGTAACAACTCCGCCCCATT
GACGCAAATGGGCGGTAGGCGTGTACGGTGGGAGGTCTATATAAGCAGAGCTGGT
TTAGTGAACCGTCAGATCCGCTAGAGATCCGCGGCCGCTAATACGACTCACTATAG
GGAGAGCCGCCACC
N-terminal NLS + Cas9 H840A
Flexible linker
M-MLV reverse transcriptase + C-terminal NLS
Plasmid backbone (containing CMV promoter and AmpR)
pU6-HEK3_PEgRNA_CTTins:
(SEQ ID NO: 735)
GAGGGCCTATTTCCCATGATTCCTTCATATTTGCATATACGATACAAGGCTGTTAGA
GAGATAATTAGAATTAATTTGACTGTAAACACAAAGATATTAGTACAAAATACGTG
ACGTAGAAAGTAATAATTTCTTGGGTAGTTTGCAGTTTTAAAATTATGTTTTAAAAT
GGACTATCATATGCTTACCGTAACTTGAAAGTATTTCGATTTCTTGGCTTTATATATC
TTGTGGAAAGGACGAAACACCGGCCCAGACTGAGCACGTGAGTTTTAGAGCTAGA
AATAGCAAGTTAAAATAAGGCTAGTCCGTTATCAACTTGAAAAAGTGGGACCGAG
TCGGTCCTCTGCCATCAAAGCGTGCTCAGTCTGTTTTTTTAAGCTTGGGCCGCT
CGAGGTACCTCTCTACATATGACATGTGAGCAAAAGGCCAGCAAAAGGCCAGGAA
CCGTAAAAAGGCCGCGTTGCTGGCGTTTTTCCATAGGCTCCGCCCCCCTGACGAG
CATCACAAAAATCGACGCTCAAGTCAGAGGTGGCGAAACCCGACAGGACTATAA
AGATACCAGGCGTTTCCCCCTGGAAGCTCCCTCGTGCGCTCTCCTGTTCCGACCCT
GCCGCTTACCGGATACCTGTCCGCCTTTCTCCCTTCGGGAAGCGTGGCGCTTTCTC
ATAGCTCACGCTGTAGGTATCTCAGTTCGGTGTAGGTCGTTCGCTCCAAGCTGGGC
TGTGTGCACGAACCCCCCGTTCAGCCCGACCGCTGCGCCTTATCCGGTAACTATCG
TCTTGAGTCCAACCCGGTAAGACACGACTTATCGCCACTGGCAGCAGCCACTGGT
AACAGGATTAGCAGAGCGAGGTATGTAGGCGGTGCTACAGAGTTCTTGAAGTGGT
GGCCTAACTACGGCTACACTAGAAGAACAGTATTTGGTATCTGCGCTCTGCTGAAG
CCAGTTACCTTCGGAAAAAGAGTTGGTAGCTCTTGATCCGGCAAACAAACCACCG
CTGGTAGCGGTGGTTTTTTTGTTTGCAAGCAGCAGATTACGCGCAGAAAAAAAGG
ATCTCAAGAAGATCCTTTGATCTTTTCTACGGGGTCTGACGCTCAGTGGAACGAAA
ACTCACGTTAAGGGATTTTGGTCATGAGATTATCAAAAAGGATCTTCACCTAGATC
CTTTTAAATTAAAAATGAAGTTTTAAATCAATCTAAAGTATATATGAGTAAACTTGG
TCTGACAGTTACCAATGCTTAATCAGTGAGGCACCTATCTCAGCGATCTGTCTATTT
CGTTCATCCATAGTTGCCTGACTCCCCGTCGTGTAGATAACTACGATACGGGAGGG
CTTACCATCTGGCCCCAGTGCTGCAATGATACCGCGAGACCCACGCTCACCGGCTC
CAGATTTATCAGCAATAAACCAGCCAGCCGGAAGGGCCGAGCGCAGAAGTGGTC
CTGCAACTTTATCCGCCTCCATCCAGTCTATTAATTGTTGCCGGGAAGCTAGAGTAA
GTAGTTCGCCAGTTAATAGTTTGCGCAACGTTGTTGCCATTGCTACAGGCATCGTG
GTGTCACGCTCGTCGTTTGGTATGGCTTCATTCAGCTCCGGTTCCCAACGATCAAG
GCGAGTTACATGATCCCCCATGTTGTGCAAAAAAGCGGTTAGCTCCTTCGGTCCTC
CGATCGTTGTCAGAAGTAAGTTGGCCGCAGTGTTATCACTCATGGTTATGGCAGCA
CTGCATAATTCTCTTACTGTCATGCCATCCGTAAGATGCTTTTCTGTGACTGGTGAG
TACTCAACCAAGTCATTCTGAGAATAGTGTATGCGGCGACCGAGTTGCTCTTGCCC
GGCGTCAATACGGGATAATACCGCGCCACATAGCAGAACTTTAAAAGTGCTCATCA
TTGGAAAACGTTCTTCGGGGCGAAAACTCTCAAGGATCTTACCGCTGTTGAGATC
CAGTTCGATGTAACCCACTCGTGCACCCAACTGATCTTCAGCATCTTTTACTTTCA
CCAGCGTTTCTGGGTGAGCAAAAACAGGAAGGCAAAATGCCGCAAAAAAGGGA
ATAAGGGCGACACGGAAATGTTGAATACTCATACTCTTCCTTTTTCAATATTATTGA
AGCATTTATCAGGGTTATTGTCTCATGAGCGGATACATATTTGAATGTATTTAGAAA
AATAAACAAATAGGGGTTCCGCGCACATTTCCCCGAAAAGTGCCACCTGACGTCG
CTAGCTGTACAAAAAAGCAGGCTTTAAAGGAACCAATTCAGTCGACTGGATCCGG
TACCAAGGTCGGGCAGGAA
U6 Promoter sequence
Spacer sequence
sgRNA scaffold
3′ extension (contains PBS and RT template)
Backbone (contains AmpR)
pLenti-hSyn-N-PE2-NpuN-P2A-GFP-KASH_U6-DNMT1-PEgRNA:
(SEQ ID NO: 736)
GTCGACGGATCGGGAGATCTCCCGATCCCCTATGGTGCACTCTCAGTACAATCTGCTCT
GATGCCGCATAGTTAAGCCAGTATCTGCTCCCTGCTTGTGTGTTGGAGGTCGCTGAGTA
GTGCGCGAGCAAAATTTAAGCTACAACAAGGCAAGGCTTGACCGACAATTGCATGAAG
AATCTGCTTAGGGTTAGGCGTTTTGCGCTGCTTCGCGATGTACGGGCCAGATATACGCG
TTGACATTGATTATTGACTAGTTATTAATAGTAATCAATTACGGGGTCATTAGTTCATAGC
CCATATATGGAGTTCCGCGTTACATAACTTACGGTAAATGGCCCGCCTGGCTGACCGCC
CAACGACCCCCGCCCATTGACGTCAATAATGACGTATGTTCCCATAGTAACGCCAATAG
GGACTTTCCATTGACGTCAATGGGTGGAGTATTTACGGTAAACTGCCCACTTGGCAGTA
CATCAAGTGTATCATATGCCAAGTACGCCCCCTATTGACGTCAATGACGGTAAATGGCC
CGCCTGGCATTATGCCCAGTACATGACCTTATGGGACTTTCCTACTTGGCAGTACATCTA
CGTATTAGTCATCGCTATTACCATGGTGATGCGGTTTTGGCAGTACATCAATGGGCGTGG
ATAGCGGTTTGACTCACGGGGATTTCCAAGTCTCCACCCCATTGACGTCAATGGGAGTT
TGTTTTGGCACCAAAATCAACGGGACTTTCCAAAATGTCGTAACAACTCCGCCCCATTG
ACGCAAATGGGCGGTAGGCGTGTACGGTGGGAGGTCTATATAAGCAGCGCGTTTTGCC
TGTACTGGGTCTCTCTGGTTAGACCAGATCTGAGCCTGGGAGCTCTCTGGCTAACTAGG
GAACCCACTGCTTAAGCCTCAATAAAGCTTGCCTTGAGTGCTTCAAGTAGTGTGTGCCC
GTCTGTTGTGTGACTCTGGTAACTAGAGATCCCTCAGACCCTTTTAGTCAGTGTGGAAA
ATCTCTAGCAGTGGCGCCCGAACAGGGACTTGAAAGCGAAAGGGAAACCAGAGGAGC
TCTCTCGACGCAGGACTCGGCTTGCTGAAGCGCGCACGGCAAGAGGCGAGGGGCGGC
GACTGGTGAGTACGCCAAAAATTTTGACTAGCGGAGGCTAGAAGGAGAGAGATGGGT
GCGAGAGCGTCAGTATTAAGCGGGGGAGAATTAGATCGCGATGGGAAAAAATTCGGTT
AAGGCCAGGGGGAAAGAAAAAATATAAATTAAAACATATAGTATGGGCAAGCAGGGAG
CTAGAACGATTCGCAGTTAATCCTGGCCTGTTAGAAACATCAGAAGGCTGTAGACAAAT
ACTGGGACAGCTACAACCATCCCTTCAGACAGGATCAGAAGAACTTAGATCATTATATA
ATACAGTAGCAACCCTCTATTGTGTGCATCAAAGGATAGAGATAAAAGACACCAAGGA
AGCTTTAGACAAGATAGAGGAAGAGCAAAACAAAAGTAAGACCACCGCACAGCAAGC
GGCCGCTGATCTTCAGACCTGGAGGAGGAGATATGAGGGACAATTGGAGAAGTGAATT
ATATAAATATAAAGTAGTAAAAATTGAACCATTAGGAGTAGCACCCACCAAGGCAAAGA
GAAGAGTGGTGCAGAGAGAAAAAAGAGCAGTGGGAATAGGAGCTTTGTTCCTTGGGT
TCTTGGGAGCAGCAGGAAGCACTATGGGCGCAGCGTCAATGACGCTGACGGTACAGG
CCAGACAATTATTGTCTGGTATAGTGCAGCAGCAGAACAATTTGCTGAGGGCTATTGAG
GCGCAACAGCATCTGTTGCAACTCACAGTCTGGGGCATCAAGCAGCTCCAGGCAAGA
ATCCTGGCTGTGGAAAGATACCTAAAGGATCAACAGCTCCTGGGGATTTGGGGTTGCT
CTGGAAAACTCATTTGCACCACTGCTGTGCCTTGGAATGCTAGTTGGAGTAATAAATCT
CTGGAACAGATTTGGAATCACACGACCTGGATGGAGTGGGACAGAGAAATTAACAATT
ACACAAGCTTAATACACTCCTTAATTGAAGAATCGCAAAACCAGCAAGAAAAGAATGA
ACAAGAATTATTGGAATTAGATAAATGGGCAAGTTTGTGGAATTGGTTTAACATAACAA
ATTGGCTGTGGTATATAAAATTATTCATAATGATAGTAGGAGGCTTGGTAGGTTTAAGAA
TAGTTTTTGCTGTACTTTCTATAGTGAATAGAGTTAGGCAGGGATATTCACCATTATCGTT
TCAGACCCACCTCCCAACCCCGAGGGGACCCGACAGGCCCGAAGGAATAGAAGAAGA
AGGTGGAGAGAGAGACAGAGACAGATCCATTCGATTAGTGAACGGATCGGCACTGCG
TGCGCCAATTCTGCAGACAAATGGCAGTATTCATCCACAATTTTAAAAGAAAAGGGGG
GATTGGGGGGTACAGTGCAGGGGAAAGAATAGTAGACATAATAGCAACAGACATACAA
ACTAAAGAATTACAAAAACAAATTACAAAAATTCAAAATTTTCGGGTTTATTACAGGGA
CAGCAGAGATCCAGTTTGGTTAATTAAGGTACCAAGGTCGGGCAGGAAGAGGGCCTAT
TTCCCATGATTCCTTCATATTTGCATATACGATACAAGGCTGTTAGAGAGATAATTAGAAT
TAATTTGACTGTAAACACAAAGATATTAGTACAAAATACGTGACGTAGAAAGTAATAAT
TTCTTGGGTAGTTTGCAGTTTTAAAATTATGTTTTAAAATGGACTATCATATGCTTACCGT
AACTTGAAAGTATTTCGATTTCTTGGCTTTATATATCTTGTGGAAAGGACGAAACACCG
CGGGCTGGAGCTGTTCGCGCGTTTTAGAGCTAGAAATAGCAAGTTAAAATAAGGC
TAGTCCGTTATCAACTTGAAAAAGTGGCACCGAGTCGGTGCAAGATGCAAGCGC
GAACAGCTCCAGTTTTTTTGAATTCAGTGCAAGTGGGTTTTAGGACCAGGATGAGGCG
GGGTGGGGGTGCCTACCTGACGACCGACCCCGACCCACTGGACAAGCACCCAACCCCCAT
TCCCCAAATTGCGCATCCCCTATCAGAGAGGGGGAGGGGAAACAGGATGCGGCGAGGCGC
GTGCGCACTGCCAGCTTCAGCACCGCGGACAGTGCCTTCGCCCCCGCCTGGCGGCGCGC
GCCACCGCCGCCTCAGCACTGAAGGCGCGCTGACGTCACTCGCCGGTCCCCCGCAAACTC
CCCTTCCCGGCCACCTTGGTCGCGTCCGCGCCGCCGCCGGCCCAGCCGGACCGCACCAC
GCGAGGCGCGAGATAGGGGGGCACGGGCGCGACCATCTGCGCTGCGGCGCCGGCGACT
CAGCGCTGCCTCAGTCTGCGGTGGGCAGCGGAGGAGTCGTGTCGTGCCTGAGAGCGCAG [symbol]
ATGAAACGGACAGCCGACGGAAGCGAGTTCGAGT
CACCAAAGAAGAAGCGGAAAGTCGACAAGAAGTACAGCATCGGCCTGGACATCGGCA
CCAACTCTGTGGGCTGGGCCGTGATCACCGACGAGTACAAGGTGCCCAGCAAGAAATT
CAAGGTGCTGGGCAACACCGACCGGCACAGCATCAAGAAGAACCTGATCGGAGCCCT
GCTGTTCGACAGCGGCGAAACAGCCGAGGCCACCCGGCTGAAGAGAACCGCCAGAA
GAAGATACACCAGACGGAAGAACCGGATCTGCTATCTGCAAGAGATCTTCAGCAACGA
GATGGCCAAGGTGGACGACAGCTTCTTCCACAGACTGGAAGAGTCCTTCCTGGTGGA
AGAGGATAAGAAGCACGAGCGGCACCCCATCTTCGGCAACATCGTGGACGAGGTGGC
CTACCACGAGAAGTACCCCACCATCTACCACCTGAGAAAGAAACTGGTGGACAGCAC
CGACAAGGCCGACCTGCGGCTGATCTATCTGGCCCTGGCCCACATGATCAAGTTCCGG
GGCCACTTCCTGATCGAGGGCGACCTGAACCCCGACAACAGCGACGTGGACAAGCTG
TTCATCCAGCTGGTGCAGACCTACAACCAGCTGTTCGAGGAAAACCCCATCAACGCCA
GCGGCGTGGACGCCAAGGCCATCCTGTCTGCCAGACTGAGCAAGAGCAGACGGCTGG
AAAATCTGATCGCCCAGCTGCCCGGCGAGAAGAAGAATGGCCTGTTCGGAAACCTGAT
TGCCCTGAGCCTGGGCCTGACCCCCAACTTCAAGAGCAACTTCGACCTGGCCGAGGAT
GCCAAACTGCAGCTGAGCAAGGACACCTACGACGACGACCTGGACAACCTGCTGGCC
CAGATCGGCGACCAGTACGCCGACCTGTTTCTGGCCGCCAAGAACCTGTCCGACGCCA
TCCTGCTGAGCGACATCCTGAGAGTGAACACCGAGATCACCAAGGCCCCCCTGAGCGC
CTCTATGATCAAGAGATACGACGAGCACCACCAGGACCTGACCCTGCTGAAAGCTCTC
GTGCGGCAGCAGCTGCCTGAGAAGTACAAAGAGATTTTCTTCGACCAGAGCAAGAAC
GGCTACGCCGGCTACATTGACGGCGGAGCCAGCCAGGAAGAGTTCTACAAGTTCATCA
AGCCCATCCTGGAAAAGATGGACGGCACCGAGGAACTGCTCGTGAAGCTGAACAGAG
AGGACCTGCTGCGGAAGCAGCGGACCTTCGACAACGGCAGCATCCCCCACCAGATCC
ACCTGGGAGAGCTGCACGCCATTCTGCGGCGGCAGGAAGATTTTTACCCATTCCTGAA
GGACAACCGGGAAAAGATCGAGAAGATCCTGACCTTCCGCATCCCCTACTACGTGGGC
CCTCTGGCCAGGGGAAACAGCAGATTCGCCTGGATGACCAGAAAGAGCGAGGAAACC
ATCACCCCCTGGAACTTCGAGGAAGTGGTGGACAAGGGCGCTTCCGCCCAGAGCTTC
ATCGAGCGGATGACCAACTTCGATAAGAACCTGCCCAACGAGAAGGTGCTGCCCAAGC
ACAGCCTGCTGTACGAGTACTTCACCGTGTATAACGAGCTGACCAAAGTGAAATACGT
GACCGAGGGAATGAGAAAGCCCGCCTTCCTGAGCGGCGAGCAGAAAAAGGCCATCGT
GGACCTGCTGTTCAAGACCAACCGGAAAGTGACCGTGAAGCAGCTGAAAGAGGACTA
CTTCAAGAAAATCGAGTGCCTGTCCTACGAGACAGAGATCCTGACAGTGGAGTATGGCCT
GCTGCCAATCGGCAAGATCGTGGAGAAGAGGATCGAGTGTACCGTGTACTCTGTGGATAAC
AATGGCAACATCTATACACAGCCCGTGGCACAGTGGCACGATAGGGGAGAGCAGGAGGTGT
TCGAGTATTGCCTGGAGGACGGCAGCCTGATCAGGGCAACCAAGGACCACAAGTTCATGAC
AGTGGATGGCCAGATGCTGCCCATCGACGAGATTTTCGAGCGGGAGCTGGACCTGATGAGA
GTGGATAACCTGCCTAAT

[symbol]

[symbol]

[symbol]

[symbol]

[symbol]

[symbol]

[symbol]

[symbol]

[symbol]

[symbol]

[symbol]

[symbol]

[symbol]

[symbol]

[symbol]

[symbol]

[symbol]

[symbol]

[symbol]

[symbol]

[symbol]

[symbol]

[symbol]

[symbol]

[symbol]

[symbol]

[symbol]

[symbol]

[symbol]

[symbol]

[symbol]

[symbol]

[symbol]

[symbol]

[symbol]

[symbol]

[symbol]

[symbol]

[symbol]

ACGCGTTAAGTCGACAATCAACCTCTGGATTACAAAATTTGTGA
AAGATTGACTGGTATTCTTAACTATGTTGCTCCTTTTACGCTATGTGGATACGCTGCTTTA
ATGCCTTTGTATCATGCTATTGCTTCCCGTATGGCTTTCATTTTCTCCTCCTTGTATAAATC
CTGGTTGCTGTCTCTTTATGAGGAGTTGTGGCCCGTTGTCAGGCAACGTGGCGTGGTGT
GCACTGTGTTTGCTGACGCAACCCCCACTGGTTGGGGCATTGCCACCACCTGTCAGCT
CCTTTCCGGGACTTTCGCTTTCCCCCTCCCTATTGCCACGGCGGAACTCATCGCCGCCT
GCCTTGCCCGCTGCTGGACAGGGGCTCGGCTGTTGGGCACTGACAATTCCGTGGTGTT
GTCGGGGAAATCATCGTCCTTTCCTTGGCTGCTCGCCTGTGTTGCCACCTGGATTCTGC
GCGGGACGTCCTTCTGCTACGTCCCTTCGGCCCTCAATCCAGCGGACCTTCCTTCCCGC
GGCCTGCTGCCGGCTCTGCGGCCTCTTCCGCGTCTTCGCCTTCGCCCTCAGACGAGTC
GGATCTCCCTTTGGGCCGCCTCCCCGCGTCGACTTTAAGACCAATGACTTACAAGGCA
GCTGTAGATCTTAGCCACTTTTTAAAAGAAAAGGGGGGACTGGAAGGGCTAATTCACT
CCCAACGAAGACAAGATCTGCTTTTTGCTTGTACTGGGTCTCTCTGGTTAGACCAGATC
TGAGCCTGGGAGCTCTCTGGCTAACTAGGGAACCCACTGCTTAAGCCTCAATAAAGCT
TGCCTTGAGTGCTTCAAGTAGTGTGTGCCCGTCTGTTGTGTGACTCTGGTAACTAGAGA
TCCCTCAGACCCTTTTAGTCAGTGTGGAAAATCTCTAGCAGGGCCCGTTTAAACCCGCT
GATCAGCCTCGACTGTGCCTTCTAGTTGCCAGCCATCTGTTGTTTGCCCCTCCCCCGTG
CCTTCCTTGACCCTGGAAGGTGCCACTCCCACTGTCCTTTCCTAATAAAATGAGGAAAT
TGCATCGCATTGTCTGAGTAGGTGTCATTCTATTCTGGGGGGTGGGGTGGGGCAGGACA
GCAAGGGGGAGGATTGGGAAGACAATAGCAGGCATGCTGGGGATGCGGTGGGCTCTAT
GGCTTCTGAGGCGGAAAGAACCAGCTGGGGCTCTAGGGGGTATCCCCACGCGCCCTGT
AGCGGCGCATTAAGCGCGGCGGGTGTGGTGGTTACGCGCAGCGTGACCGCTACACTTG
CCAGCGCCCTAGCGCCCGCTCCTTTCGCTTTCTTCCCTTCCTTTCTCGCCACGTTCGCC
GGCTTTCCCCGTCAAGCTCTAAATCGGGGGCTCCCTTTAGGGTTCCGATTTAGTGCTTT
ACGGCACCTCGACCCCAAAAAACTTGATTAGGGTGATGGTTCACGTAGTGGGCCATCG
CCCTGATAGACGGTTTTTCGCCCTTTGACGTTGGAGTCCACGTTCTTTAATAGTGGACT
CTTGTTCCAAACTGGAACAACACTCAACCCTATCTCGGTCTATTCTTTTGATTTATAAGG
GATTTTGCCGATTTCGGCCTATTGGTTAAAAAATGAGCTGATTTAACAAAAATTTAACGC
GAATTAATTCTGTGGAATGTGTGTCAGTTAGGGTGTGGAAAGTCCCCAGGCTCCCCAG
CAGGCAGAAGTATGCAAAGCATGCATCTCAATTAGTCAGCAACCAGGTGTGGAAAGTC
CCCAGGCTCCCCAGCAGGCAGAAGTATGCAAAGCATGCATCTCAATTAGTCAGCAACC
ATAGTCCCGCCCCTAACTCCGCCCATCCCGCCCCTAACTCCGCCCAGTTCCGCCCATTC
TCCGCCCCATGGCTGACTAATTTTTTTTATTTATGCAGAGGCCGAGGCCGCCTCTGCCTC
TGAGCTATTCCAGAAGTAGTGAGGAGGCTTTTTTGGAGGCCTAGGCTTTTGCAAAAAG
CTCCCGGGAGCTTGTATATCCATTTTCGGATCTGATCAGCACGTGTTGACAATTAATCAT
CGGCATAGTATATCGGCATAGTATAATACGACAAGGTGAGGAACTAAACCATGGCCAAG
TTGACCAGTGCCGTTCCGGTGCTCACCGCGCGCGACGTCGCCGGAGCGGTCGAGTTCT
GGACCGACCGGCTCGGGTTCTCCCGGGACTTCGTGGAGGACGACTTCGCCGGTGTGGT
CCGGGACGACGTGACCCTGTTCATCAGCGCGGTCCAGGACCAGGTGGTGCCGGACAA
CACCCTGGCCTGGGTGTGGGTGCGCGGCCTGGACGAGCTGTACGCCGAGTGGTCGGA
GGTCGTGTCCACGAACTTCCGGGACGCCTCCGGGCCGGCCATGACCGAGATCGGCGA
GCAGCCGTGGGGGCGGGAGTTCGCCCTGCGCGACCCGGCCGGCAACTGCGTGCACTT
CGTGGCCGAGGAGCAGGACTGACACGTGCTACGAGATTTCGATTCCACCGCCGCCTTC
TATGAAAGGTTGGGCTTCGGAATCGTTTTCCGGGACGCCGGCTGGATGATCCTCCAGCG
CGGGGATCTCATGCTGGAGTTCTTCGCCCACCCCAACTTGTTTATTGCAGCTTATAATGG
TTACAAATAAAGCAATAGCATCACAAATTTCACAAATAAAGCATTTTTTTCACTGCATTC
TAGTTGTGGTTTGTCCAAACTCATCAATGTATCTTATCATGTCTGTATACCGTCGACCTCT
AGCTAGAGCTTGGCGTAATCATGGTCATAGCTGTTTCCTGTGTGAAATTGTTATCCGCTC
ACAATTCCACACAACATACGAGCCGGAAGCATAAAGTGTAAAGCCTGGGGTGCCTAAT
GAGTGAGCTAACTCACATTAATTGCGTTGCGCTCACTGCCCGCTTTCCAGTCGGGAAAC
CTGTCGTGCCAGCTGCATTAATGAATCGGCCAACGCGCGGGGAGAGGCGGTTTGCGTA
TTGGGCGCTCTTCCGCTTCCTCGCTCACTGACTCGCTGCGCTCGGTCGTTCGGCTGCGG
CGAGCGGTATCAGCTCACTCAAAGGCGGTAATACGGTTATCCACAGAATCAGGGGATA
ACGCAGGAAAGAACATGTGAGCAAAAGGCCAGCAAAAGGCCAGGAACCGTAAAAAG
GCCGCGTTGCTGGCGTTTTTCCATAGGCTCCGCCCCCCTGACGAGCATCACAAAAATCG
ACGCTCAAGTCAGAGGTGGCGAAACCCGACAGGACTATAAAGATACCAGGCGTTTCCC
CCTGGAAGCTCCCTCGTGCGCTCTCCTGTTCCGACCCTGCCGCTTACCGGATACCTGTC
CGCCTTTCTCCCTTCGGGAAGCGTGGCGCTTTCTCATAGCTCACGCTGTAGGTATCTCA
GTTCGGTGTAGGTCGTTCGCTCCAAGCTGGGCTGTGTGCACGAACCCCCCGTTCAGCC
CGACCGCTGCGCCTTATCCGGTAACTATCGTCTTGAGTCCAACCCGGTAAGACACGACT
TATCGCCACTGGCAGCAGCCACTGGTAACAGGATTAGCAGAGCGAGGTATGTAGGCGG
TGCTACAGAGTTCTTGAAGTGGTGGCCTAACTACGGCTACACTAGAAGAACAGTATTTG
GTATCTGCGCTCTGCTGAAGCCAGTTACCTTCGGAAAAAGAGTTGGTAGCTCTTGATCC
GGCAAACAAACCACCGCTGGTAGCGGTGGTTTTTTTGTTTGCAAGCAGCAGATTACGC
GCAGAAAAAAAGGATCTCAAGAAGATCCTTTGATCTTTTCTACGGGGTCTGACGCTCA
GTGGAACGAAAACTCACGTTAAGGGATTTTGGTCATGAGATTATCAAAAAGGATCTTC
ACCTAGATCCTTTTAAATTAAAAATGAAGTTTTAAATCAATCTAAAGTATATATGAGTAA
ACTTGGTCTGACAGTTACCAATGCTTAATCAGTGAGGCACCTATCTCAGCGATCTGTCT
ATTTCGTTCATCCATAGTTGCCTGACTCCCCGTCGTGTAGATAACTACGATACGGGAGG
GCTTACCATCTGGCCCCAGTGCTGCAATGATACCGCGAGACCCACGCTCACCGGCTCC
AGATTTATCAGCAATAAACCAGCCAGCCGGAAGGGCCGAGCGCAGAAGTGGTCCTGC
AACTTTATCCGCCTCCATCCAGTCTATTAATTGTTGCCGGGAAGCTAGAGTAAGTAGTTC
GCCAGTTAATAGTTTGCGCAACGTTGTTGCCATTGCTACAGGCATCGTGGTGTCACGCT
CGTCGTTTGGTATGGCTTCATTCAGCTCCGGTTCCCAACGATCAAGGCGAGTTACATGA
TCCCCCATGTTGTGCAAAAAAGCGGTTAGCTCCTTCGGTCCTCCGATCGTTGTCAGAAG
TAAGTTGGCCGCAGTGTTATCACTCATGGTTATGGCAGCACTGCATAATTCTCTTACTGT
CATGCCATCCGTAAGATGCTTTTCTGTGACTGGTGAGTACTCAACCAAGTCATTCTGAG
AATAGTGTATGCGGCGACCGAGTTGCTCTTGCCCGGCGTCAATACGGGATAATACCGCG
CCACATAGCAGAACTTTAAAAGTGCTCATCATTGGAAAACGTTCTTCGGGGCGAAAAC
TCTCAAGGATCTTACCGCTGTTGAGATCCAGTTCGATGTAACCCACTCGTGCACCCAAC
TGATCTTCAGCATCTTTTACTTTCACCAGCGTTTCTGGGTGAGCAAAAACAGGAAGGC
AAAATGCCGCAAAAAAGGGAATAAGGGCGACACGGAAATGTTGAATACTCATACTCTT
CCTTTTTCAATATTATTGAAGCATTTATCAGGGTTATTGTCTCATGAGCGGATACATATTT
GAATGTATTTAGAAAAATAAACAAATAGGGGTTCCGCGCACATTTCCCCGAAAAGT
GCCACCTGAC
U6promoter
PEgRNA
hSynpromoter
N-termPE2
N-termNpu

[symbol]

pLenti-hSyn-C-PE2-NpuC:
(SEQ ID NO: 737)
GTCGACGGATCGGGAGATCTCCCGATCCCCTATGGTGCACTCTCAGTACAATCTGCTCT
GATGCCGCATAGTTAAGCCAGTATCTGCTCCCTGCTTGTGTGTTGGAGGTCGCTGAGTA
GTGCGCGAGCAAAATTTAAGCTACAACAAGGCAAGGCTTGACCGACAATTGCATGAAG
AATCTGCTTAGGGTTAGGCGTTTTGCGCTGCTTCGCGATGTACGGGCCAGATATACGCG
TTGACATTGATTATTGACTAGTTATTAATAGTAATCAATTACGGGGTCATTAGTTCATAGC
CCATATATGGAGTTCCGCGTTACATAACTTACGGTAAATGGCCCGCCTGGCTGACCGCC
CAACGACCCCCGCCCATTGACGTCAATAATGACGTATGTTCCCATAGTAACGCCAATAG
GGACTTTCCATTGACGTCAATGGGTGGAGTATTTACGGTAAACTGCCCACTTGGCAGTA
CATCAAGTGTATCATATGCCAAGTACGCCCCCTATTGACGTCAATGACGGTAAATGGCC
CGCCTGGCATTATGCCCAGTACATGACCTTATGGGACTTTCCTACTTGGCAGTACATCTA
CGTATTAGTCATCGCTATTACCATGGTGATGCGGTTTTGGCAGTACATCAATGGGCGTGG
ATAGCGGTTTGACTCACGGGGATTTCCAAGTCTCCACCCCATTGACGTCAATGGGAGTT
TGTTTTGGCACCAAAATCAACGGGACTTTCCAAAATGTCGTAACAACTCCGCCCCATTG
ACGCAAATGGGCGGTAGGCGTGTACGGTGGGAGGTCTATATAAGCAGCGCGTTTTGCC
TGTACTGGGTCTCTCTGGTTAGACCAGATCTGAGCCTGGGAGCTCTCTGGCTAACTAGG
GAACCCACTGCTTAAGCCTCAATAAAGCTTGCCTTGAGTGCTTCAAGTAGTGTGTGCCC
GTCTGTTGTGTGACTCTGGTAACTAGAGATCCCTCAGACCCTTTTAGTCAGTGTGGAAA
ATCTCTAGCAGTGGCGCCCGAACAGGGACTTGAAAGCGAAAGGGAAACCAGAGGAGC
TCTCTCGACGCAGGACTCGGCTTGCTGAAGCGCGCACGGCAAGAGGCGAGGGGCGGC
GACTGGTGAGTACGCCAAAAATTTTGACTAGCGGAGGCTAGAAGGAGAGAGATGGGT
GCGAGAGCGTCAGTATTAAGCGGGGGAGAATTAGATCGCGATGGGAAAAAATTCGGTT
AAGGCCAGGGGGAAAGAAAAAATATAAATTAAAACATATAGTATGGGCAAGCAGGGAG
CTAGAACGATTCGCAGTTAATCCTGGCCTGTTAGAAACATCAGAAGGCTGTAGACAAAT
ACTGGGACAGCTACAACCATCCCTTCAGACAGGATCAGAAGAACTTAGATCATTATATA
ATACAGTAGCAACCCTCTATTGTGTGCATCAAAGGATAGAGATAAAAGACACCAAGGA
AGCTTTAGACAAGATAGAGGAAGAGCAAAACAAAAGTAAGACCACCGCACAGCAAGC
GGCCGCTGATCTTCAGACCTGGAGGAGGAGATATGAGGGACAATTGGAGAAGTGAATT
ATATAAATATAAAGTAGTAAAAATTGAACCATTAGGAGTAGCACCCACCAAGGCAAAGA
GAAGAGTGGTGCAGAGAGAAAAAAGAGCAGTGGGAATAGGAGCTTTGTTCCTTGGGT
TCTTGGGAGCAGCAGGAAGCACTATGGGCGCAGCGTCAATGACGCTGACGGTACAGG
CCAGACAATTATTGTCTGGTATAGTGCAGCAGCAGAACAATTTGCTGAGGGCTATTGAG
GCGCAACAGCATCTGTTGCAACTCACAGTCTGGGGCATCAAGCAGCTCCAGGCAAGA
ATCCTGGCTGTGGAAAGATACCTAAAGGATCAACAGCTCCTGGGGATTTGGGGTTGCT
CTGGAAAACTCATTTGCACCACTGCTGTGCCTTGGAATGCTAGTTGGAGTAATAAATCT
CTGGAACAGATTTGGAATCACACGACCTGGATGGAGTGGGACAGAGAAATTAACAATT
ACACAAGCTTAATACACTCCTTAATTGAAGAATCGCAAAACCAGCAAGAAAAGAATGA
ACAAGAATTATTGGAATTAGATAAATGGGCAAGTTTGTGGAATTGGTTTAACATAACAA
ATTGGCTGTGGTATATAAAATTATTCATAATGATAGTAGGAGGCTTGGTAGGTTTAAGAA
TAGTTTTTGCTGTACTTTCTATAGTGAATAGAGTTAGGCAGGGATATTCACCATTATCGTT
TCAGACCCACCTCCCAACCCCGAGGGGACCCGACAGGCCCGAAGGAATAGAAGAAGA
AGGTGGAGAGAGAGACAGAGACAGATCCATTCGATTAGTGAACGGATCGGCACTGCG
TGCGCCAATTCTGCAGACAAATGGCAGTATTCATCCACAATTTTAAAAGAAAAGGGGG
GATTGGGGGGTACAGTGCAGGGGAAAGAATAGTAGACATAATAGCAACAGACATACAA
ACTAAAGAATTACAAAAACAAATTACAAAAATTCAAAATTTTCGGGTTTATTACAGGGA
CAGCAGAGATCCAGTTTGGTTAATTAAGGTACCAGTGCAAGTGGGTTTTAGGACCAGG
ATGAGGCGGGGTGGGGGTGCCTACCTGACGACCGACCCCGACCCACTGGACAAGCAC
CCAACCCCCATTCCCCAAATTGCGCATCCCCTATCAGAGAGGGGGAGGGGAAACAGGA
TGCGGCGAGGCGCGTGCGCACTGCCAGCTTCAGCACCGCGGACAGTGCCTTCGCCCC
CGCCTGGCGGCGCGCGCCACCGCCGCCTCAGCACTGAAGGCGCGCTGACGTCACTCG
CCGGTCCCCCGCAAACTCCCCTTCCCGGCCACCTTGGTCGCGTCCGCGCCGCCGCCGG
CCCAGCCGGACCGCACCACGCGAGGCGCGAGATAGGGGGGCACGGGCGCGACCATCT
GCGCTGCGGCGCCGGCGACTCAGCGCTGCCTCAGTCTGCGGTGGGCAGCGGAGGAGT
CGTGTCGTGCCTGAGAGCGCAGTCGAGAATCTAGAGCGCTGCCACCATGAAACGGACAGC
CGACGGAAGCGAGTTCGAGTCACCAAAGAAGAAGCGGAAAGTCATCAAGATTGCTACACGG
AAATACCTGGGAAAGCAGAACGTGTACGACATCGGCGTGGAGCGGGATCACAACTTCGCCC
TGAAGAATGGCTTTATCGCCAGCAATTGCTTCGACTCCGTGGAAATCTCCGGCGTGGA
AGATCGGTTCAACGCCTCCCTGGGCACATACCACGATCTGCTGAAAATTATCAAG
GACAAGGACTTCCTGGACAATGAGGAAAACGAGGACATTCTGGAAGATATCGTG
CTGACCCTGACACTGTTTGAGGACAGAGAGATGATCGAGGAACGGCTGAAAACC
TATGCCCACCTGTTCGACGACAAAGTGATGAAGCAGCTGAAGCGGCGGAGATAC
ACCGGCTGGGGCAGGCTGAGCCGGAAGCTGATCAACGGCATCCGGGACAAGCA
GTCCGGCAAGACAATCCTGGATTTCCTGAAGTCCGACGGCTTCGCCAACAGAAA
CTTCATGCAGCTGATCCACGACGACAGCCTGACCTTTAAAGAGGACATCCAGAAA
GCCCAGGTGTCCGGCCAGGGCGATAGCCTGCACGAGCACATTGCCAATCTGGCC
GGCAGCCCCGCCATTAAGAAGGGCATCCTGCAGACAGTGAAGGTGGTGGACGAG
CTCGTGAAAGTGATGGGCCGGCACAAGCCCGAGAACATCGTGATCGAAATGGCC
AGAGAGAACCAGACCACCCAGAAGGGACAGAAGAACAGCCGCGAGAGAATGAA
GCGGATCGAAGAGGGCATCAAAGAGCTGGGCAGCCAGATCCTGAAAGAACACCC
CGTGGAAAACACCCAGCTGCAGAACGAGAAGCTGTACCTGTACTACCTGCAGAA
TGGGCGGGATATGTACGTGGACCAGGAACTGGACATCAACCGGCTGTCCGACTA
CGATGTGGACCATATCGTGCCTCAGAGCTTTCTGAAGGACGACTCCATCGACAAC
AAGGTGCTGACCAGAAGCGACAAGAACCGGGGCAAGAGCGACAACGTGCCCTC
CGAAGAGGTCGTGAAGAAGATGAAGAACTACTGGCGGCAGCTGCTGAACGCCAA
GCTGATTACCCAGAGAAAGTTCGACAATCTGACCAAGGCCGAGAGAGGCGGCCT
GAGCGAACTGGATAAGGCCGGCTTCATCAAGAGACAGCTGGTGGAAACCCGGCA
GATCACAAAGCACGTGGCACAGATCCTGGACTCCCGGATGAACACTAAGTACGA
CGAGAATGACAAGCTGATCCGGGAAGTGAAAGTGATCACCCTGAAGTCCAAGCT
GGTGTCCGATTTCCGGAAGGATTTCCAGTTTTACAAAGTGCGCGAGATCAACAAC
TACCACCACGCCCACGACGCCTACCTGAACGCCGTCGTGGGAACCGCCCTGATC
AAAAAGTACCCTAAGCTGGAAAGCGAGTTCGTGTACGGCGACTACAAGGTGTAC
GACGTGCGGAAGATGATCGCCAAGAGCGAGCAGGAAATCGGCAAGGCTACCGCC
AAGTACTTCTTCTACAGCAACATCATGAACTTTTTCAAGACCGAGATTACCCTGGC
CAACGGCGAGATCCGGAAGCGGCCTCTGATCGAGACAAACGGCGAAACCGGGG
AGATCGTGTGGGATAAGGGCCGGGATTTTGCCACCGTGCGGAAAGTGCTGAGCA
TGCCCCAAGTGAATATCGTGAAAAAGACCGAGGTGCAGACAGGCGGCTTCAGCA
AAGAGTCTATCCTGCCCAAGAGGAACAGCGATAAGCTGATCGCCAGAAAGAAGG
ACTGGGACCCTAAGAAGTACGGCGGCTTCGACAGCCCCACCGTGGCCTATTCTG
TGCTGGTGGTGGCCAAAGTGGAAAAGGGCAAGTCCAAGAAACTGAAGAGTGTG
AAAGAGCTGCTGGGGATCACCATCATGGAAAGAAGCAGCTTCGAGAAGAATCCC
ATCGACTTTCTGGAAGCCAAGGGCTACAAAGAAGTGAAAAAGGACCTGATCATCA
AGCTGCCTAAGTACTCCCTGTTCGAGCTGGAAAACGGCCGGAAGAGAATGCTGG
CCTCTGCCGGCGAACTGCAGAAGGGAAACGAACTGGCCCTGCCCTCCAAATATG
TGAACTTCCTGTACCTGGCCAGCCACTATGAGAAGCTGAAGGGCTCCCCCGAGG
ATAATGAGCAGAAACAGCTGTTTGTGGAACAGCACAAGCACTACCTGGACGAGAT
CATCGAGCAGATCAGCGAGTTCTCCAAGAGAGTGATCCTGGCCGACGCTAATCTG
GACAAAGTGCTGTCCGCCTACAACAAGCACCGGGATAAGCCCATCAGAGAGCAG
GCCGAGAATATCATCCACCTGTTTACCCTGACCAATCTGGGAGCCCCTGCCGCCT
TCAAGTACTTTGACACCACCATCGACCGGAAGAGGTACACCAGCACCAAAGAGG
TGCTGGACGCCACCCTGATCCACCAGAGCATCACCGGCCTGTACGAGACACGGA
TCGACCTGTCTCAGCTGGGAGGTGACTCTGGCGGCTCAAAAAGAACCGCCGACG
GCAGCGAATTCGAGCCCAAGAAGAAGAGGAAAGTCTAAACGCGTTAAGTCGACAA
TCAACCTCTGGATTACAAAATTTGTGAAAGATTGACTGGTATTCTTAACTATGTTGCTCC
TTTTACGCTATGTGGATACGCTGCTTTAATGCCTTTGTATCATGCTATTGCTTCCCGTATG
GCTTTCATTTTCTCCTCCTTGTATAAATCCTGGTTGCTGTCTCTTTATGAGGAGTTGTGG
CCCGTTGTCAGGCAACGTGGCGTGGTGTGCACTGTGTTTGCTGACGCAACCCCCACTG
GTTGGGGCATTGCCACCACCTGTCAGCTCCTTTCCGGGACTTTCGCTTTCCCCCTCCCT
ATTGCCACGGCGGAACTCATCGCCGCCTGCCTTGCCCGCTGCTGGACAGGGGCTCGGC
TGTTGGGCACTGACAATTCCGTGGTGTTGTCGGGGAAATCATCGTCCTTTCCTTGGCTG
CTCGCCTGTGTTGCCACCTGGATTCTGCGCGGGACGTCCTTCTGCTACGTCCCTTCGGC
CCTCAATCCAGCGGACCTTCCTTCCCGCGGCCTGCTGCCGGCTCTGCGGCCTCTTCCGC
GTCTTCGCCTTCGCCCTCAGACGAGTCGGATCTCCCTTTGGGCCGCCTCCCCGCGTCGA
CTTTAAGACCAATGACTTACAAGGCAGCTGTAGATCTTAGCCACTTTTTAAAAGAAAAG
GGGGGACTGGAAGGGCTAATTCACTCCCAACGAAGACAAGATCTGCTTTTTGCTTGTA
CTGGGTCTCTCTGGTTAGACCAGATCTGAGCCTGGGAGCTCTCTGGCTAACTAGGGAA
CCCACTGCTTAAGCCTCAATAAAGCTTGCCTTGAGTGCTTCAAGTAGTGTGTGCCCGTC
TGTTGTGTGACTCTGGTAACTAGAGATCCCTCAGACCCTTTTAGTCAGTGTGGAAAATC
TCTAGCAGGGCCCGTTTAAACCCGCTGATCAGCCTCGACTGTGCCTTCTAGTTGCCAGC
CATCTGTTGTTTGCCCCTCCCCCGTGCCTTCCTTGACCCTGGAAGGTGCCACTCCCACT
GTCCTTTCCTAATAAAATGAGGAAATTGCATCGCATTGTCTGAGTAGGTGTCATTCTATT
CTGGGGGGTGGGGTGGGGCAGGACAGCAAGGGGGAGGATTGGGAAGACAATAGCAG
GCATGCTGGGGATGCGGTGGGCTCTATGGCTTCTGAGGCGGAAAGAACCAGCTGGGGC
TCTAGGGGGTATCCCCACGCGCCCTGTAGCGGCGCATTAAGCGCGGCGGGTGTGGTGG
TTACGCGCAGCGTGACCGCTACACTTGCCAGCGCCCTAGCGCCCGCTCCTTTCGCTTTC
TTCCCTTCCTTTCTCGCCACGTTCGCCGGCTTTCCCCGTCAAGCTCTAAATCGGGGGCT
CCCTTTAGGGTTCCGATTTAGTGCTTTACGGCACCTCGACCCCAAAAAACTTGATTAGG
GTGATGGTTCACGTAGTGGGCCATCGCCCTGATAGACGGTTTTTCGCCCTTTGACGTTG
GAGTCCACGTTCTTTAATAGTGGACTCTTGTTCCAAACTGGAACAACACTCAACCCTAT
CTCGGTCTATTCTTTTGATTTATAAGGGATTTTGCCGATTTCGGCCTATTGGTTAAAAAAT
GAGCTGATTTAACAAAAATTTAACGCGAATTAATTCTGTGGAATGTGTGTCAGTTAGGG
TGTGGAAAGTCCCCAGGCTCCCCAGCAGGCAGAAGTATGCAAAGCATGCATCTCAATT
AGTCAGCAACCAGGTGTGGAAAGTCCCCAGGCTCCCCAGCAGGCAGAAGTATGCAAA
GCATGCATCTCAATTAGTCAGCAACCATAGTCCCGCCCCTAACTCCGCCCATCCCGCCC
CTAACTCCGCCCAGTTCCGCCCATTCTCCGCCCCATGGCTGACTAATTTTTTTTATTTATG
CAGAGGCCGAGGCCGCCTCTGCCTCTGAGCTATTCCAGAAGTAGTGAGGAGGCTTTTT
TGGAGGCCTAGGCTTTTGCAAAAAGCTCCCGGGAGCTTGTATATCCATTTTCGGATCTG
ATCAGCACGTGTTGACAATTAATCATCGGCATAGTATATCGGCATAGTATAATACGACAA
GGTGAGGAACTAAACCATGGCCAAGTTGACCAGTGCCGTTCCGGTGCTCACCGCGCGC
GACGTCGCCGGAGCGGTCGAGTTCTGGACCGACCGGCTCGGGTTCTCCCGGGACTTCG
TGGAGGACGACTTCGCCGGTGTGGTCCGGGACGACGTGACCCTGTTCATCAGCGCGGT
CCAGGACCAGGTGGTGCCGGACAACACCCTGGCCTGGGTGTGGGTGCGCGGCCTGGA
CGAGCTGTACGCCGAGTGGTCGGAGGTCGTGTCCACGAACTTCCGGGACGCCTCCGG
GCCGGCCATGACCGAGATCGGCGAGCAGCCGTGGGGGCGGGAGTTCGCCCTGCGCGA
CCCGGCCGGCAACTGCGTGCACTTCGTGGCCGAGGAGCAGGACTGACACGTGCTACG
AGATTTCGATTCCACCGCCGCCTTCTATGAAAGGTTGGGCTTCGGAATCGTTTTCCGGG
ACGCCGGCTGGATGATCCTCCAGCGCGGGGATCTCATGCTGGAGTTCTTCGCCCACCCC
AACTTGTTTATTGCAGCTTATAATGGTTACAAATAAAGCAATAGCATCACAAATTTCACA
AATAAAGCATTTTTTTCACTGCATTCTAGTTGTGGTTTGTCCAAACTCATCAATGTATCT
TATCATGTCTGTATACCGTCGACCTCTAGCTAGAGCTTGGCGTAATCATGGTCATAGCTG
TTTCCTGTGTGAAATTGTTATCCGCTCACAATTCCACACAACATACGAGCCGGAAGCAT
AAAGTGTAAAGCCTGGGGTGCCTAATGAGTGAGCTAACTCACATTAATTGCGTTGCGCT
CACTGCCCGCTTTCCAGTCGGGAAACCTGTCGTGCCAGCTGCATTAATGAATCGGCCA
ACGCGCGGGGAGAGGCGGTTTGCGTATTGGGCGCTCTTCCGCTTCCTCGCTCACTGAC
TCGCTGCGCTCGGTCGTTCGGCTGCGGCGAGCGGTATCAGCTCACTCAAAGGCGGTAA
TACGGTTATCCACAGAATCAGGGGATAACGCAGGAAAGAACATGTGAGCAAAAGGCC
AGCAAAAGGCCAGGAACCGTAAAAAGGCCGCGTTGCTGGCGTTTTTCCATAGGCTCCG
CCCCCCTGACGAGCATCACAAAAATCGACGCTCAAGTCAGAGGTGGCGAAACCCGAC
AGGACTATAAAGATACCAGGCGTTTCCCCCTGGAAGCTCCCTCGTGCGCTCTCCTGTTC
CGACCCTGCCGCTTACCGGATACCTGTCCGCCTTTCTCCCTTCGGGAAGCGTGGCGCTT
TCTCATAGCTCACGCTGTAGGTATCTCAGTTCGGTGTAGGTCGTTCGCTCCAAGCTGGG
CTGTGTGCACGAACCCCCCGTTCAGCCCGACCGCTGCGCCTTATCCGGTAACTATCGTC
TTGAGTCCAACCCGGTAAGACACGACTTATCGCCACTGGCAGCAGCCACTGGTAACAG
GATTAGCAGAGCGAGGTATGTAGGCGGTGCTACAGAGTTCTTGAAGTGGTGGCCTAAC
TACGGCTACACTAGAAGAACAGTATTTGGTATCTGCGCTCTGCTGAAGCCAGTTACCTT
CGGAAAAAGAGTTGGTAGCTCTTGATCCGGCAAACAAACCACCGCTGGTAGCGGTGG
TTTTTTTGTTTGCAAGCAGCAGATTACGCGCAGAAAAAAAGGATCTCAAGAAGATCCT
TTGATCTTTTCTACGGGGTCTGACGCTCAGTGGAACGAAAACTCACGTTAAGGGATTTT
GGTCATGAGATTATCAAAAAGGATCTTCACCTAGATCCTTTTAAATTAAAAATGAAGTTT
TAAATCAATCTAAAGTATATATGAGTAAACTTGGTCTGACAGTTACCAATGCTTAATCAG
TGAGGCACCTATCTCAGCGATCTGTCTATTTCGTTCATCCATAGTTGCCTGACTCCCCGT
CGTGTAGATAACTACGATACGGGAGGGCTTACCATCTGGCCCCAGTGCTGCAATGATAC
CGCGAGACCCACGCTCACCGGCTCCAGATTTATCAGCAATAAACCAGCCAGCCGGAAG
GGCCGAGCGCAGAAGTGGTCCTGCAACTTTATCCGCCTCCATCCAGTCTATTAATTGTT
GCCGGGAAGCTAGAGTAAGTAGTTCGCCAGTTAATAGTTTGCGCAACGTTGTTGCCATT
GCTACAGGCATCGTGGTGTCACGCTCGTCGTTTGGTATGGCTTCATTCAGCTCCGGTTC
CCAACGATCAAGGCGAGTTACATGATCCCCCATGTTGTGCAAAAAAGCGGTTAGCTCC
TTCGGTCCTCCGATCGTTGTCAGAAGTAAGTTGGCCGCAGTGTTATCACTCATGGTTAT
GGCAGCACTGCATAATTCTCTTACTGTCATGCCATCCGTAAGATGCTTTTCTGTGACTGG
TGAGTACTCAACCAAGTCATTCTGAGAATAGTGTATGCGGCGACCGAGTTGCTCTTGCC
CGGCGTCAATACGGGATAATACCGCGCCACATAGCAGAACTTTAAAAGTGCTCATCATT
GGAAAACGTTCTTCGGGGCGAAAACTCTCAAGGATCTTACCGCTGTTGAGATCCAGTT
CGATGTAACCCACTCGTGCACCCAACTGATCTTCAGCATCTTTTACTTTCACCAGCGTTT
CTGGGTGAGCAAAAACAGGAAGGCAAAATGCCGCAAAAAAGGGAATAAGGGCGACA
CGGAAATGTTGAATACTCATACTCTTCCTTTTTCAATATTATTGAAGCATTTATCAGGGTT
ATTGTCTCATGAGCGGATACATATTTGAATGTATTTAGAAAAATAAACAAATAGGGG
TTCCGCGCACATTTCCCCGAAAAGTGCCACCTGAC
hSynpromoter
C-termNpu
C-termwtCas9
pLenti-U6-DNMT1_nicking_sgRNA:
(SEQ ID NO: 738)
TAACAAATTGGCTGTGGTATATAAAATTATTCATAATGATAGTAGGAGGCTTGGTAGGTT
TAAGAATAGTTTTTGCTGTACTTTCTATAGTGAATAGAGTTAGGCAGGGATATTCACCAT
TATCGTTTCAGACCCACCTCCCAACCCCGAGGGGACCCAGAGAGGGCCTATTTCCCATG
ATTCCTTCATATTTGCATATACGATACAAGGCTGTTAGAGAGATAATTAGAATTAATTTGACTGT
AAACACAAAGATATTAGTACAAAATACGTGACGTAGAAAGTAATAATTTCTTGGGTAGTTTTGCA
GTTTTAAAATTATGTTTTAAAATGGACTATCATATGCTTACCGTAACTTGAAAGTATTTCGATTTC
TTGGCTTTATATATCTTGTGGAAAGGACGAAACACC

[symbol]

[symbol]

[symbol]

[symbol]

TTTTTTAAGCTTGGCGTAACTAGATCTTGAGACAAATGGCAGTATTC
ATCCACAATTTTAAAAGAAAAGGGGGGATTGGGGGGTACAGTGCAGGGGAAAGAATA
GTAGACATAATAGCAACAGACATACAAACTAAAGAATTACAAAAACAAATTACAAAAA
TTCAAAATTTTCGGGTTTATTACAGGGACAGCAGAGATCCACTTTGGCGCCGGCTCGAG
GGGGCCCGGGTGCAAAGATGGATAAAGTTTTAAACAGAGAGGAATCTTTGCAGCTAAT
GGACCTTCTAGGTCTTGAAAGGAGTGGGAATTGGCTCCGGTGCCCGTCAGTGGGCAGA
GCGCACATCGCCCACAGTCCCCGAGAAGTTGGGGGGAGGGGTCGGCAATTGATCCGG
TGCCTAGAGAAGGTGGCGCGGGGTAAACTGGGAAAGTGATGTCGTGTACTGGCTCCGC
CTTTTTCCCGAGGGTGGGGGAGAACCGTATATAAGTGCAGTAGTCGCCGTGAACGTTCT
TTTTCGCAACGGGTTTGCCGCCAGAACACAGGTAAGTGCCGTGTGTGGTTCCCGCGGG
CCTGGCCTCTTTACGGGTTATGGCCCTTGCGTGCCTTGAATTACTTCCACCTGGCTGCA
GTACGTGATTCTTGATCCCGAGCTTCGGGTTGGAAGTGGGTGGGAGAGTTCGAGGCCT
TGCGCTTAAGGAGCCCCTTCGCCTCGTGCTTGAGTTGAGGCCTGGCCTGGGCGCTGGG
GCCGCCGCGTGCGAATCTGGTGGCACCTTCGCGCCTGTCTCGCTGCTTTCGATAAGTCT
CTAGCCATTTAAAATTTTTGATGACCTGCTGCGACGCTTTTTTTCTGGCAAGATAGTCTT
GTAAATGCGGGCCAAGATCTGCACACTGGTATTTCGGTTTTTGGGGCCGCGGGCGGCG
ACGGGGCCCGTGCGTCCCAGCGCACATGTTCGGCGAGGCGGGGCCTGCGAGCGCGGC
CACCGAGAATCGGACGGGGGTAGTCTCAAGCTGGCCGGCCTGCTCTGGTGCCTGGCCT
CGCGCCGCCGTGTATCGCCCCGCCCTGGGCGGCAAGGCTGGCCCGGTCGGCACCAGTT
GCGTGAGCGGAAAGATGGCCGCTTCCCGGCCCTGCTGCAGGGAGCTCAAAATGGAGG
ACGCGGCGCTCGGGAGAGCGGGCGGGTGAGTCACCCACACAAAGGAAAAGGGCCTT
TCCGTCCTCAGCCGTCGCTTCATGTGACTCCACGGAGTACCGGGCGCCGTCCAGGCAC
CTCGATTAGTTCTCGAGCTTTTGGAGTACGTCGTCTTTAGGTTGGGGGGAGGGGTTTTA
TGCGATGGAGTTTCCCCACACTGAGTGGGTGGAGACTGAAGTTAGGCCAGCTTGGCAC
TTGATGTAATTCTCCTTGGAATTTGCCCTTTTTGAGTTTGGATCTTGGTTCATTCTCAAG
CCTCAGACAGTGGTTCAAAGTTTTTTTCTTCCATTTCAGGTGTCGTGACGTACGGCCAC
CATGACCGAGTACAAGCCCACGGTGCGCCTCGCCACCCGCGACGACGTCCCCAGGGC
CGTACGCACCCTCGCCGCCGCGTTCGCCGACTACCCCGCCACGCGCCACACCGTCGAT
CCGGACCGCCACATCGAGCGGGTCACCGAGCTGCAAGAACTCTTCCTCACGCGCGTCG
GGCTCGACATCGGCAAGGTGTGGGTCGCGGACGACGGCGCCGCCGTGGCGGTCTGGA
CCACGCCGGAGAGCGTCGAAGCGGGGGCGGTGTTCGCCGAGATCGGCCCGCGCATGG
CCGAGTTGAGCGGTTCCCGGCTGGCCGCGCAGCAACAGATGGAAGGCCTCCTGGCGC
CGCACCGGCCCAAGGAGCCCGCGTGGTTCCTGGCCACCGTCGGAGTCTCGCCCGACC
ACCAGGGCAAGGGTCTGGGCAGCGCCGTCGTGCTCCCCGGAGTGGAGGCGGCCGAGC
GCGCCGGGGTGCCCGCCTTCCTGGAGACCTCCGCGCCCCGCAACCTCCCCTTCTACGA
GCGGCTCGGCTTCACCGTCACCGCCGACGTCGAGGTGCCCGAAGGACCGCGCACCTG
GTGCATGACCCGCAAGCCCGGTGCCTGAACGCGTTAAGTCGACAATCAACCTCTGGAT
TACAAAATTTGTGAAAGATTGACTGGTATTCTTAACTATGTTGCTCCTTTTACGCTATGT
GGATACGCTGCTTTAATGCCTTTGTATCATGCTATTGCTTCCCGTATGGCTTTCATTTTCT
CCTCCTTGTATAAATCCTGGTTGCTGTCTCTTTATGAGGAGTTGTGGCCCGTTGTCAGGC
AACGTGGCGTGGTGTGCACTGTGTTTGCTGACGCAACCCCCACTGGTTGGGGCATTGC
CACCACCTGTCAGCTCCTTTCCGGGACTTTCGCTTTCCCCCTCCCTATTGCCACGGCGG
AACTCATCGCCGCCTGCCTTGCCCGCTGCTGGACAGGGGCTCGGCTGTTGGGCACTGA
CAATTCCGTGGTGTTGTCGGGGAAATCATCGTCCTTTCCTTGGCTGCTCGCCTGTGTTG
CCACCTGGATTCTGCGCGGGACGTCCTTCTGCTACGTCCCTTCGGCCCTCAATCCAGCG
GACCTTCCTTCCCGCGGCCTGCTGCCGGCTCTGCGGCCTCTTCCGCGTCTTCGCCTTCG
CCCTCAGACGAGTCGGATCTCCCTTTGGGCCGCCTCCCCGCGTCGACTTTAAGACCAAT
GACTTACAAGGCAGCTGTAGATCTTAGCCACTTTTTAAAAGAAAAGGGGGGACTGGAA
GGGCTAATTCACTCCCAACGAAGACAAGATCTGCTTTTTGCTTGTACTGGGTCTCTCTG
GTTAGACCAGATCTGAGCCTGGGAGCTCTCTGGCTAACTAGGGAACCCACTGCTTAAG
CCTCAATAAAGCTTGCCTTGAGTGCTTCAAGTAGTGTGTGCCCGTCTGTTGTGTGACTC
TGGTAACTAGAGATCCCTCAGACCCTTTTAGTCAGTGTGGAAAATCTCTAGCAGTACGT
ATAGTAGTTCATGTCATCTTATTATTCAGTATTTATAACTTGCAAAGAAATGAATATCAGA
GAGTGAGAGGAACTTGTTTATTGCAGCTTATAATGGTTACAAATAAAGCAATAGCATCA
CAAATTTCACAAATAAAGCATTTTTTTCACTGCATTCTAGTTGTGGTTTGTCCAAACTCA
TCAATGTATCTTATCATGTCTGGCTCTAGCTATCCCGCCCCTAACTCCGCCCATCCCGCC
CCTAACTCCGCCCAGTTCCGCCCATTCTCCGCCCCATGGCTGACTAATTTTTTTTATTTAT
GCAGAGGCCGAGGCCGCCTCGGCCTCTGAGCTATTCCAGAAGTAGTGAGGAGGCTTTT
TTGGAGGCCTAGGGACGTACCCAATTCGCCCTATAGTGAGTCGTATTACGCGCGCTCAC
TGGCCGTCGTTTTACAACGTCGTGACTGGGAAAACCCTGGCGTTACCCAACTTAATCG
CCTTGCAGCACATCCCCCTTTCGCCAGCTGGCGTAATAGCGAAGAGGCCCGCACCGAT
CGCCCTTCCCAACAGTTGCGCAGCCTGAATGGCGAATGGGACGCGCCCTGTAGCGGCG
CATTAAGCGCGGCGGGTGTGGTGGTTACGCGCAGCGTGACCGCTACACTTGCCAGCGC
CCTAGCGCCCGCTCCTTTCGCTTTCTTCCCTTCCTTTCTCGCCACGTTCGCCGGCTTTCC
CCGTCAAGCTCTAAATCGGGGGCTCCCTTTAGGGTTCCGATTTAGTGCTTTACGGCACC
TCGACCCCAAAAAACTTGATTAGGGTGATGGTTCACGTAGTGGGCCATCGCCCTGATAG
ACGGTTTTTCGCCCTTTGACGTTGGAGTCCACGTTCTTTAATAGTGGACTCTTGTTCCA
AACTGGAACAACACTCAACCCTATCTCGGTCTATTCTTTTGATTTATAAGGGATTTTGCC
GATTTCGGCCTATTGGTTAAAAAATGAGCTGATTTAACAAAAATTTAACGCGAATTTTA
ACAAAATATTAACGCTTACAATTTAGGTGGCACTTTTCGGGGAAATGTGCGCGGAACCC
CTATTTGTTTATTTTTCTAAATACATTCAAATATGTATCCGCTCATGAGACAATAACCCTG
ATAAATGCTTCAATAATATTGAAAAAGGAAGAGTATGAGTATTCAACATTTCCGTGTCGC
CCTTATTCCCTTTTTTGCGGCATTTTGCCTTCCTGTTTTTGCTCACCCAGAAACGCTGGT
GAAAGTAAAAGATGCTGAAGATCAGTTGGGTGCACGAGTGGGTTACATCGAACTGGAT
CTCAACAGCGGTAAGATCCTTGAGAGTTTTCGCCCCGAAGAACGTTTTCCAATGATGA
GCACTTTTAAAGTTCTGCTATGTGGCGCGGTATTATCCCGTATTGACGCCGGGCAAGAG
CAACTCGGTCGCCGCATACACTATTCTCAGAATGACTTGGTTGAGTACTCACCAGTCAC
AGAAAAGCATCTTACGGATGGCATGACAGTAAGAGAATTATGCAGTGCTGCCATAACC
ATGAGTGATAACACTGCGGCCAACTTACTTCTGACAACGATCGGAGGACCGAAGGAGC
TAACCGCTTTTTTGCACAACATGGGGGATCATGTAACTCGCCTTGATCGTTGGGAACCG
GAGCTGAATGAAGCCATACCAAACGACGAGCGTGACACCACGATGCCTGTAGCAATGG
CAACAACGTTGCGCAAACTATTAACTGGCGAACTACTTACTCTAGCTTCCCGGCAACA
ATTAATAGACTGGATGGAGGCGGATAAAGTTGCAGGACCACTTCTGCGCTCGGCCCTTC
CGGCTGGCTGGTTTATTGCTGATAAATCTGGAGCCGGTGAGCGTGGGTCTCGCGGTATC
ATTGCAGCACTGGGGCCAGATGGTAAGCCCTCCCGTATCGTAGTTATCTACACGACGGG
GAGTCAGGCAACTATGGATGAACGAAATAGACAGATCGCTGAGATAGGTGCCTCACTG
ATTAAGCATTGGTAACTGTCAGACCAAGTTTACTCATATATACTTTAGATTGATTTAAAA
CTTCATTTTTAATTTAAAAGGATCTAGGTGAAGATCCTTTTTGATAATCTCATGACCAAA
ATCCCTTAACGTGAGTTTTCGTTCCACTGAGCGTCAGACCCCGTAGAAAAGATCAAAG
GATCTTCTTGAGATCCTTTTTTTCTGCGCGTAATCTGCTGCTTGCAAACAAAAAAACCA
CCGCTACCAGCGGTGGTTTGTTTGCCGGATCAAGAGCTACCAACTCTTTTTCCGAAGGT
AACTGGCTTCAGCAGAGCGCAGATACCAAATACTGTTCTTCTAGTGTAGCCGTAGTTAG
GCCACCACTTCAAGAACTCTGTAGCACCGCCTACATACCTCGCTCTGCTAATCCTGTTA
CCAGTGGCTGCTGCCAGTGGCGATAAGTCGTGTCTTACCGGGTTGGACTCAAGACGAT
AGTTACCGGATAAGGCGCAGCGGTCGGGCTGAACGGGGGGTTCGTGCACACAGCCCA
GCTTGGAGCGAACGACCTACACCGAACTGAGATACCTACAGCGTGAGCTATGAGAAAG
CGCCACGCTTCCCGAAGGGAGAAAGGCGGACAGGTATCCGGTAAGCGGCAGGGTCGG
AACAGGAGAGCGCACGAGGGAGCTTCCAGGGGGAAACGCCTGGTATCTTTATAGTCCT
GTCGGGTTTCGCCACCTCTGACTTGAGCGTCGATTTTTGTGATGCTCGTCAGGGGGGCG
GAGCCTATGGAAAAACGCCAGCAACGCGGCCTTTTTACGGTTCCTGGCCTTTTGCTGG
CCTTTTGCTCACATGTTCTTTCCTGCGTTATCCCCTGATTCTGTGGATAACCGTATTACCG
CCTTTGAGTGAGCTGATACCGCTCGCCGCAGCCGAACGACCGAGCGCAGCGAGTCAGT
GAGCGAGGAAGCGGAAGAGCGCCCAATACGCAAACCGCCTCTCCCCGCGCGTTGGCC
GATTCATTAATGCAGCTGGCACGACAGGTTTCCCGACTGGAAAGCGGGCAGTGAGCGC
AACGCAATTAATGTGAGTTAGCTCACTCATTAGGCACCCCAGGCTTTACACTTTATGCTT
CCGGCTCGTATGTTGTGTGGAATTGTGAGCGGATAACAATTTCACACAGGAAACAGCT
ATGACCATGATTACGCCAAGCGCGCAATTAACCCTCACTAAAGGGAACAAAAGCTGGA
GCTGCAAGCTTAATGTAGTCTTATGCAATACTCTTGTAGTCTTGCAACATGGTAACGATG
AGTTAGCAACATGCCTTACAAGGAGAGAAAAAGCACCGTGCATGCCGATTGGTGGAA
GTAAGGTGGTACGATCGTGCCTTATTAGGAAGGCAACAGACGGGTCTGACATGGATTG
GACGAACCACTGAATTGCCGCATTGCAGAGATATTGTATTTAAGTGCCTAGCTCGATAC
ATAAACGGGTCTCTCTGGTTAGACCAGATCTGAGCCTGGGAGCTCTCTGGCTAACTAGG
GAACCCACTGCTTAAGCCTCAATAAAGCTTGCCTTGAGTGCTTCAAGTAGTGTGTGCCC
GTCTGTTGTGTGACTCTGGTAACTAGAGATCCCTCAGACCCTTTTAGTCAGTGTGGAAA
ATCTCTAGCAGTGGCGCCCGAACAGGGACTTGAAAGCGAAAGGGAAACCAGAGGAGC
TCTCTCGACGCAGGACTCGGCTTGCTGAAGCGCGCACGGCAAGAGGCGAGGGGCGGC
GACTGGTGAGTACGCCAAAAATTTTGACTAGCGGAGGCTAGAAGGAGAGAGATGGGT
GCGAGAGCGTCAGTATTAAGCGGGGGAGAATTAGATCGCGATGGGAAAAAATTCGGTT
AAGGCCAGGGGGAAAGAAAAAATATAAATTAAAACATATAGTATGGGCAAGCAGGGAG
CTAGAACGATTCGCAGTTAATCCTGGCCTGTTAGAAACATCAGAAGGCTGTAGACAAAT
ACTGGGACAGCTACAACCATCCCTTCAGACAGGATCAGAAGAACTTAGATCATTATATA
ATACAGTAGCAACCCTCTATTGTGTGCATCAAAGGATAGAGATAAAAGACACCAAGGA
AGCTTTAGACAAGATAGAGGAAGAGCAAAACAAAAGTAAGACCACCGCACAGCAAGC
GGCCGCTGATCTTCAGACCTGGAGGAGGAGATATGAGGGACAATTGGAGAAGTGAATT
ATATAAATATAAAGTAGTAAAAATTGAACCATTAGGAGTAGCACCCACCAAGGCAAAGA
GAAGAGTGGTGCAGAGAGAAAAAAGAGCAGTGGGAATAGGAGCTTTGTTCCTTGGGT
TCTTGGGAGCAGCAGGAAGCACTATGGGCGCAGCGTCAATGACGCTGACGGTACAGG
CCAGACAATTATTGTCTGGTATAGTGCAGCAGCAGAACAATTTGCTGAGGGCTATTGAG
GCGCAACAGCATCTGTTGCAACTCACAGTCTGGGGCATCAAGCAGCTCCAGGCAAGA
ATCCTGGCTGTGGAAAGATACCTAAAGGATCAACAGCTCCTGGGGATTTGGGGTTGCT
CTGGAAAACTCATTTGCACCACTGCTGTGCCTTGGAATGCTAGTTGGAGTAATAAATCT
CTGGAACAGATTTGGAATCACACGACCTGGATGGAGTGGGACAGAGAAATTAACAATT
ACACAAGCTTAATACACTCCTTAATTGAAGAATCGCAAAACCAGCAAGAAAAGAATGA
ACAAGAATTATTGGAATTAGATAAATGGGCAAGTTTGTGGAATTGGTTTAACA
U6promoter

[symbol]

Amino acid sequences of Maloney murine leukemia virus reverse
transcriptase (M-MLV RT) variants used herein.
PE1 M-MLV RT:
(SEQ ID NO: 739)
TLNIEDEYRLHETSKEPDVSLGSTWLSDFPQAWAETGGMGLAVRQAPLIIPLKATSTP
VSIKQYPMSQEARLGIKPHIQRLLDQGILVPCQSPWNTPLLPVKKPGTNDYRPVQDLR
EVNKRVEDIHPTVPNPYNLLSGLPPSHQWYTVLDLKDAFFCLRLHPTSQPLFAFEWR
DPEMGISGQLTWTRLPQGFKNSPTLFDEALHRDLADFRIQHPDLILLQYVDDLLLAAT
SELDCQQGTRALLQTLGNLGYRASAKKAQICQKQVKYLGYLLKEGQRWLTEARKET
VMGQPTPKTPRQLREFLGTAGFCRLWIPGFAEMAAPLYPLTKTGTLFNWGPDQQKAY
QEIKQALLTAPALGLPDLTKPFELFVDEKQGYAKGVLTQKLGPWRRPVAYLSKKLDPV
AAGWPPCLRMVAAIAVLTKDAGKLTMGQPLVILAPHAVEALVKQPPDRWLSNARMT
HYQALLLDTDRVQFGPVVALNPATLLPLPEEGLQHNCLDILAEAHGTRPDLTDQPLPD
ADHTWYTDGSSLLQEGQRKAGAAVTTETEVIWAKALPAGTSAQRAELIALTQALKM
AEGKKLNVYTDSRYAFATAHIHGEIYRRRGLLTSEGKEIKNKDEILALLKALFLPKRLS
IIHCPGHQKGHSAEARGNRMADQAARKAAITETPDTSTLLIENSSP
M3 M-MLV RT (D200N, T330P, L603W) (see Baranauskas et al.¹⁸²):
(SEQ ID NO: 740)
TLNIEDEYRLHETSKEPDVSLGSTWLSDFPQAWAETGGMGLAVRQAPLIIPLKATSTP
VSIKQYPMSQEARLGIKPHIQRLLDQGILVPCQSPWNTPLLPVKKPGTNDYRPVQDLR
EVNKRVEDIHPTVPNPYNLLSGLPPSHQWYTVLDLKDAFFCLRLHPTSQPLFAFEWR
DPEMGISGQLTWTRLPQGFKNSPTLFNEALHRDLADFRIQHPDLILLQYVDDLLLAAT
SELDCQQGTRALLQTLGNLGYRASAKKAQICQKQVKYLGYLLKEGQRWLTEARKET
VMGQPTPKTPRQLREFLGTAGFCRLWIPGFAEMAAPLYPLTKPGTLFNWGPDQQKAY
QEIKQALLTAPALGLPDLTKPFELFVDEKQGYAKGVLTQKLGPWRRPVAYLSKKLDPV
AAGWPPCLRMVAAIAVLTKDAGKLTMGQPLVILAPHAVEALVKQPPDRWLSNARMT
HYQALLLDTDRVQFGPVVALNPATLLPLPEEGLQHNCLDILAEAHGTRPDLTDQPLPD
ADHTWYTDGSSLLQEGQRKAGAAVTTETEVIWAKALPAGTSAQRAELIALTQALKM
AEGKKLNVYTDSRYAFATAHIHGEIYRRRGWLTSEGKEIKNKDEILALLKALFLPKRL
SIIHCPGHQKGHSAEARGNRMADQAARKAAITETPDTSTLLIENSSP
PE2 M-MLV RT (D200N, T306K, W313F, T330P, L603W):
(SEQ ID NO: 741)
TLNIEDEYRLHETSKEPDVSLGSTWLSDFPQAWAETGGMGLAVRQAPLIIPLKATSTP
VSIKQYPMSQEARLGIKPHIQRLLDQGILVPCQSPWNTPLLPVKKPGTNDYRPVQDLR
EVNKRVEDIHPTVPNPYNLLSGLPPSHQWYTVLDLKDAFFCLRLHPTSQPLFAFEWR
DPEMGISGQLTWTRLPQGFKNSPTLFNEALHRDLADFRIQHPDLILLQYVDDLLLAAT
SELDCQQGTRALLQTLGNLGYRASAKKAQICQKQVKYLGYLLKEGQRWLTEARKET
VMGQPTPKTPRQLREFLGKAGFCRLFIPGFAEMAAPLYPLTKPGTLFNWGPDQQKAY
QEIKQALLTAPALGLPDLTKPFELFVDEKQGYAKGVLTQKLGPWRRPVAYLSKKLDPV
AAGWPPCLRMVAAIAVLTKDAGKLTMGQPLVILAPHAVEALVKQPPDRWLSNARMT
HYQALLLDTDRVQFGPVVALNPATLLPLPEEGLQHNCLDILAEAHGTRPDLTDQPLPD
ADHTWYTDGSSLLQEGQRKAGAAVTTETEVIWAKALPAGTSAQRAELIALTQALKM
AEGKKLNVYTDSRYAFATAHIHGEIYRRRGWLTSEGKEIKNKDEILALLKALFLPKRL
SIIHCPGHQKGHSAEARGNRMADQAARKAAITETPDTSTLLIENSSP
M3-deadRT M-MLV RT:
(SEQ ID NO: 742)
TLNIEDEYRLHETSKEPDVSLGSTWLSDFPQAWAETGGMGLAVRQAPLIIPLKATSTP
VSIKQYPMSQEARLGIKPHIQRLLDQGILVPCQSPWNTPLLPVKLPGTNDYSPVQDLR
EVNKRVEDIHPTVPNPYNLLSGLPPSHQWYTVLDLKDAFFCLRLHPTSQPLFAFEWR
DPEMGISGQLTWTRLPQGFKNSPTLFNEALHRDLADFRIQHPDLILLQYVDDLLLAAT
SELDCQQGTRALLQTLGNLGYRASAKKAQICQKQVKYLGYLLKEGQRWLTEARKET
VMGQPTPKTPRQLREFLGTAGFCRLWIPGFAEMAAPLYPLTKPGTLFNWGPDQQKAY
QEIKQALLTAPALGLPDLTKPFELFVDEKQGYAKGVLTQKLGPWRRPVAYLSKKLDPV
AAGWPPCLRMVAAIAVLTKDAGKLTMGQPLVILAPHAVEALVKQPPDRWLSNARMT
HYQALLLDTDRVQFGPVVALNPATLLPLPEEGLQHNCLDILAEAHGTRPDLTDQPLPD
ADHTWYTDGSSLLQEGQRKAGAAVTTETEVIWAKALPAGTSAQRAELIALTQALKM
AEGKKLNVYTDSRYAFATAHIHGEIYRRRGWLTSEGKEIKNKDEILALLKALFLPKRL
SIIHCPGHQKGHSAEARGNRMADQAARKAAITETPDTSTLLIENSSP

### References for Example 12

[1427] Each of the following references are cited in Example 12, each of which are incorporated herein by reference.
[1428] 1. Landrum, M. J. et al. ClinVar: public archive of interpretations of clinically relevant variants. Nucleic Acids Res. 44, D862-D868 (2016).
[1429] 2. Jinek, M. et al. A Programmable Dual-RNA-Guided DNA Endonuclease in Adaptive Bacterial Immunity. Science 337, 816-821 (2012).
[1430] 3. Cong, L. et al. Multiplex Genome Engineering Using CRISPR/Cas Systems. Science 339, 819-823 (2013).
[1431] 4. Mali, P. et al. RNA-Guided Human Genome Engineering via Cas9. Science 339, 823-826 (2013).
[1432] 5. Yang, H. et al. One-Step Generation of Mice Carrying Reporter and Conditional Alleles by CRISPR/Cas-Mediated Genome Engineering. Cell 154, 1370-1379 (2013).
[1433] 6. Kim, S., Kim, D., Cho, S. W., Kim, J. & Kim, J.-S. Highly efficient RNA-guided genome editing in human cells via delivery of purified Cas9 ribonucleoproteins. Genome Res. 24, 1012-1019 (2014).
[1434] 7. Orlando, S. J. et al. Zinc-finger nuclease-driven targeted integration into mammalian genomes using donors with limited chromosomal homology. Nucleic Acids Res. 38, e152-e152 (2010).
[1435] 8. Tsai, S. Q. et al. GUIDE-seq enables genome-wide profiling of off-target cleavage by CRISPRCas nucleases. Nat. Biotechnol. 33, 187-197 (2015).
[1436] 9. Suzuki, K. et al. In vivo genome editing via CRISPR/Cas9 mediated homology-independent targeted integration. Nature 540, 144-149 (2016).
[1437] 10. Kosicki, M., Tomberg, K. & Bradley, A. Repair of double-strand breaks induced by CRISPR-Cas9 leads to large deletions and complex rearrangements. Nat. Biotechnol. 36, 765-771 (2018).
[1438] 11. Haapaniemi, E., Botla, S., Persson, J., Schmierer, B. & Taipale, J. CRISPR-Cas9 genome editing induces a p53-mediated DNA damage response. Nat. Med. 24, 927-930 (2018).
[1439] 12. Ihry, R. J. et al. p53 inhibits CRISPR-Cas9 engineering in human pluripotent stem cells. Nat. Med. 24, 939-946 (2018).
[1440] 13. Rouet, P., Smih, F. & Jasin, M. Expression of a site-specific endonuclease stimulates homologous recombination in mammalian cells. Proc. Natl. Acad. Sci. 91, 6064-6068 (1994).
[1441] 14. Chapman, J. R., Taylor, M. R. G. & Boulton, S. J. Playing the end game: DNA double-strand break repair pathway choice. Mol. Cell 47, 497-510 (2012).
[1442] 15. Cox, D. B. T., Platt, R. J. & Zhang, F. Therapeutic genome editing: prospects and challenges. Nat. Med. 21, 121-131 (2015).
[1443] 16. Paquet, D. et al. Efficient introduction of specific homozygous and heterozygous mutations using CRISPR/Cas9. Nature 533, 125-129 (2016).
[1444] 17. Chu, V. T. et al. Increasing the efficiency of homology-directed repair for CRISPR-Cas9-induced precise gene editing in mammalian cells. Nat. Biotechnol. 33, 543-548 (2015).
[1445] 18. Maruyama, T. et al. Increasing the efficiency of precise genome editing with CRISPR-Cas9 by inhibition of nonhomologous end joining. Nat. Biotechnol. 33, 538-542 (2015).
[1446] 19. Rees, H. A., Yeh, W.-H. & Liu, D. R. Development of hRad51-Cas9 nickase fusions that mediate HDR without double-stranded breaks. Nat. Commun. 10, 1-12 (2019).
[1447] 20. Shen, M. W. et al. Predictable and precise template-free CRISPR editing of pathogenic variants. Nature 563, 646-651 (2018).
[1448] 21. Rees, H. A. & Liu, D. R. Base editing: precision chemistry on the genome and transcriptome of living cells. Nat. Rev. Genet. 19, 770 (2018).
[1449] 22. Komor, A. C., Kim, Y. B., Packer, M. S., Zuris, J. A. & Liu, D. R. Programmable editing of a target base in genomic DNA without double-stranded DNA cleavage. Nature 533, 420-424 (2016).
[1450] 23. Gaudelli, N. M. et al. Programmable base editing of A⋅T to G⋅C in genomic DNA without DNA cleavage. Nature 551, 464-471 (2017).
[1451] 24. Gao, X. et al. Treatment of autosomal dominant hearing loss by in vivo delivery of genome editing agents. Nature 553, 217-221 (2018).
[1452] 25. Ingram, V. M. A specific chemical difference between the globins of normal human and sickle-cell anaemia haemoglobin. Nature 178, 792-794 (1956).
[1453] 26. Myerowitz, R. & Costigan, F. C. The major defect in Ashkenazi Jews with Tay-Sachs disease is an insertion in the gene for the alpha-chain of beta-hexosaminidase. J. Biol. Chem. 263, 18587-18589 (1988).
[1454] 27. Zielenski, J. Genotype and Phenotype in Cystic Fibrosis. Respiration 67, 117-133 (2000).
[1455] 28. Mead, S. et al. A Novel Protective Prion Protein Variant that Colocalizes with Kuru Exposure. N. Engl. J. Med. 361, 2056-2065 (2009).
[1456] 29. Marraffini, L. A. & Sontheimer, E. J. CRISPR interference limits horizontal gene transfer in staphylococci by targeting DNA. Science 322, 1843-1845 (2008).
[1457] 30. Barrangou, R. et al. CRISPR provides acquired resistance against viruses in prokaryotes. Science 315, 1709-1712 (2007).
[1458] 31. Jiang, F. & Doudna, J. A. CRISPR-Cas9 Structures and Mechanisms. Annu. Rev. Biophys. 46, 505-529 (2017).
[1459] 32. Hille, F. et al. The Biology of CRISPR-Cas: Backward and Forward. Cell 172, 1239-1259 (2018).
[1460] 33. Luan, D. D., Korman, M. H., Jakubczak, J. L. & Eickbush, T. H. Reverse transcription of R2Bm RNA is primed by a nick at the chromosomal target site: a mechanism for non-LTR retrotransposition. Cell 72, 595-605 (1993).
[1461] 34. Liu, Y., Kao, H.-I. & Bambara, R. A. Flap endonuclease 1: a central component of DNA metabolism. Annu. Rev. Biochem. 73, 589-615 (2004).
[1462] 35. Richardson, C. D., Ray, G. J., DeWitt, M. A., Curie, G. L. & Corn, J. E. Enhancing homology directed genome editing by catalytically active and inactive CRISPR-Cas9 using asymmetric donor DNA. Nat. Biotechnol. 34, 339-344 (2016).
[1463] 36. Qi, L. S. et al. Repurposing CRISPR as an RNA-Guided Platform for Sequence-Specific Control of Gene Expression. Cell 152, 1173-1183 (2013).
[1464] 37. Shechner, D. M., Hacisuleyman, E., Younger, S. T. & Rinn, J. L. Multiplexable, locus-specific targeting of long RNAs with CRISPR-Display. Nat. Methods 12, 664-670 (2015).
[1465] 38. Tang, W., Hu, J. H. & Liu, D. R. Aptazyme-embedded guide RNAs enable ligand-responsive genome editing and transcriptional activation. Nat. Commun. 8, 15939 (2017).
[1466] 39. Jinek, M. et al. Structures of Cas9 Endonucleases Reveal RNA-Mediated Conformational Activation. Science 343, 1247997 (2014).
[1467] 40. Nishimasu, H. et al. Crystal Structure of Cas9 in Complex with Guide RNA and Target DNA. Cell 156, 935-949 (2014).
[1468] 41. Jiang, F., Zhou, K., Ma, L., Gressel, S. & Doudna, J. A. A Cas9-guide RNA complex preorganized for target DNA recognition. Science 348, 1477-1481 (2015).
[1469] 42. Baranauskas, A. et al. Generation and characterization of new highly thermostable and processive M-MuLV reverse transcriptase variants. Protein Eng. Des. Sel. 25, 657-668 (2012).
[1470] 43. Gerard, G. F. et al. The role of template-primer in protection of reverse transcriptase from thermal inactivation. Nucleic Acids Res. 30, 3118-3129 (2002).
[1471] 44. Arezi, B. & Hogrefe, H. Novel mutations in Moloney Murine Leukemia Virus reverse transcriptase increase thermostability through tighter binding to template-primer. Nucleic Acids Res. 37, 473-481 (2009).
[1472] 45. Kotewicz, M. L., Sampson, C. M., D'Alessio, J. M. & Gerard, G. F. Isolation of cloned Moloney murine leukemia virus reverse transcriptase lacking ribonuclease H activity. Nucleic Acids Res. 16, 265-277 (1988).
[1473] 46. Thuronyi, B. W. et al. Continuous evolution of base editors with expanded target compatibility and improved activity. Nat. Biotechnol. (2019). doi:10.1038/s41587-019-0193-0
[1474] 47. Kim, Y. B. et al. Increasing the genome-targeting scope and precision of base editing with engineered Cas9-cytidine deaminase fusions. Nat. Biotechnol. 35, 371-376 (2017).
[1475] 48. Koblan, L. W. et al. Improving cytidine and adenine base editors by expression optimization and ancestral reconstruction. Nat. Biotechnol. (2018). doi:10.1038/nbt.4172
[1476] 49. Kleinstiver, B. P. et al. High-fidelity CRISPR-Cas9 nucleases with no detectable genome-wide off target effects. Nature 529, 490-495 (2016).
[1477] 50. Zuo, E. et al. Cytosine base editor generates substantial off-target single-nucleotide variants in mouse embryos. Science 364, 289-292 (2019).
[1478] 51. Jin, S. et al. Cytosine, but not adenine, base editors induce genome-wide off-target mutations in rice. Science 364, 292-295 (2019).
[1479] 52. Kim, D., Kim, D., Lee, G., Cho, S.-I. & Kim, J.-S. Genome-wide target specificity of CRISPR RNA guided adenine base editors. Nat. Biotechnol. 37, 430-435 (2019).
[1480] 53. Grunewald, J. et al. Transcriptome-wide off-target RNA editing induced by CRISPR-guided DNA base editors. Nature 569, 433-437 (2019).
[1481] 54. Zhou, C. et al. Off-target RNA mutation induced by DNA base editing and its elimination by mutagenesis. Nature 571, 275-278 (2019).
[1482] 55. Rees, H. A., Wilson, C., Doman, J. L. & Liu, D. R. Analysis and minimization of cellular RNA editing by DNA adenine base editors. Sci. Adv. 5, eaax5717 (2019).
[1483] 56. Ostertag, E. M. & Kazazian Jr, H. H. Biology of Mammalian L1 Retrotransposons. Annu. Rev. Genet. 35, 501-538 (2001).
[1484] 57. Griffiths, D. J. Endogenous retroviruses in the human genome sequence. Genome Biol. 2, REVIEWS 1017 (2001).
[1485] 58. Berkhout, B., Jebbink, M. & Zsiros, J. Identification of an Active Reverse Transcriptase Enzyme Encoded by a Human Endogenous HERV-K Retrovirus. J. Virol. 73, 2365-2375 (1999).
[1486] 59. Halvas, E. K., Svarovskaia, E. S. & Pathak, V. K. Role of Murine Leukemia Virus Reverse Transcriptase Deoxyribonucleoside Triphosphate-Binding Site in Retroviral Replication and In Vivo Fidelity. J. Virol. 74, 10349-10358 (2000).
[1487] 60. Dever, D. P. et al. CRISPR/Cas9 Beta-globin Gene Targeting in Human Hematopoietic Stem Cells. Nature 539, 384-389 (2016).
[1488] 61. Park, S. H. et al. Highly efficient editing of the β-globin gene in patient-derived hematopoietic stem and progenitor cells to treat sickle cell disease. Nucleic Acids Res. doi:10.1093/nar/gkz475
[1489] 62. Collinge, J. Prion diseases of humans and animals: their causes and molecular basis. Annu. Rev. Neurosci. 24, 519-550 (2001).
[1490] 63. Asante, E. A. et al. A naturally occurring variant of the human prion protein completely prevents prion disease. Nature 522, 478-481 (2015).
[1491] 64. Zettler, J., Schutz, V. & Mootz, H. D. The naturally split Npu DnaE intein exhibits an extraordinarily high rate in the protein trans-splicing reaction. FEBS Lett. 583, 909-914 (2009).
[1492] 65. Kugler, S., Kilic, E. & Bahr, M. Human synapsin 1 gene promoter confers highly neuron-specific long-term transgene expression from an adenoviral vector in the adult rat brain depending on the transduced area. Gene Ther. 10, 337-347 (2003).
[1493] 66. de Felipe, P., Hughes, L. E., Ryan, M. D. & Brown, J. D. Co-translational, intraribosomal cleavageof polypeptides by the foot-and-mouth disease virus 2A peptide. J. Biol. Chem. 278, 11441-11448 (2003).

### Example 13—Cell Data Recording and Lineage Tracing by PE

### Background

[1494] Genome modification can be used to study and record cellular processes and development. Linking cellular events, like cell division or signaling cascade activation, to DNA sequence modifications stores cellular histories as interpretable DNA sequence changes that would describe whether specific cellular events had taken place. DNA editing is necessary for these applications because DNA is faithfully passed from one cell to the next in a way that RNA and proteins are not. Information relating to cellular state and lineage are in general lost when modifications are made to short-lived protein and RNA molecules. Recording cellular events within a single cell is a powerful way to understand how disease states are initiated, maintained, and changed relative to healthy controls. The ability to probe these questions has implications for understanding the development of cancer, neurological disease, and a host of other important problems in human health. prime editing (PE) provides a system for creating targeted and sequence-specified genomic insertions, deletions, or mutations. Repeated modification of a DNA target that can be sequenced by targeted amplicon sequencing and/or RNA sequencing (which is of particular value for single cell recording experiments) can be used to record a host of important biological processes, including activation of signaling cascades, metabolic states, and cellular differentiation programs. Connecting internal and external cellular signals to sequence modifications in the genome is, in theory, possible for any signal for which a signal responsive promoter exists. It is believed that PE enables a greatly expanded toolkit for probing the cellular lineage and the signaling histories of eukaryotic and prokaryotic cells in both cultured conditions and in vivo.

[1495] Previous Standards

[1496] Targeted sequence insertion, deletion, or mutation can be used to study a number of important biological questions including lineage tracing and recording of cellular stimuli. The current toolkit for generating these signatures in the genome is limited. Mutagenesis of target loci has been developed to date using both DNA-nucleases and base editors.

[1497] CRISPR/Cas9 nuclease cutting of target sequences generates stochastic sequence changes to generate a large number of insertion or deletion (indel) products. The large number of sequence outcomes that arise from Cas9 cutting allows for clear determination of sequences that have been cut by the nuclease. The ability to distinguish cut versus non-cut sequences has been used in two predominant ways.

[1498] First, the expression of the Cas9 nuclease and/or its single guide RNA (sgRNA) have been connected to cellular signals. Additionally, whether that signal has occurred based on sequence modifications to the Cas9 targeted genomic locus has been recorded. However, this approach is limited because each signal requires a unique target locus, which makes tracking the relative timing of multiple signals difficult to interpret. Another limitation to this approach is that multiple target loci are desired for a specific sgRNA because generation of an indel often severely hinders additional mutagenesis of the target locus; this often means that pre-engineered target loci are integrated into cells for editing instead of direct mutagenesis of endogenous loci.

[1499] Second, Cas9 indels have been used to track cellular lineages. As described herein, the large number of possible indel states generated by Cas9 nuclease activity allows for the generation of cellular developmental trees that suggest which cells have arisen from one another across time. This approach is a powerful way to understand how cells arise from one another and has been used to help identify unique cell states and types across developmental time by performing RNA sequencing on selected cellular pools. This approach cannot independently report on cellular signaling events, their order, and may have biases when reporting on pre-cursor versus terminally differentiated cell states.

[1500] Cas9 nuclease mediated lineage tracing and signal recording are powerful techniques that come with some important caveats. Signal recording with Cas9 nuclease is often very technically challenging. Cas9 cutting exhausts the target locus (repeated cutting is difficult once an indel is generated) making it difficult to record long term stimuli at the single cell level. The kinetics of Cas9 cutting can be tuned to enable longer term recording events though the ability to integrate the order, intensity, and duration of multiple stimuli remains a very challenging technical problem that may not be achievable with this tool. Cas9 lineage tracing experiments have been incredibly powerful but suffer from minor technical challenges of sequence collapse due to simultaneous Cas9 cuts at a target locus. These lineage-tracing experiments require editing of pre-designed target loci, limiting the flexibility of this approach.

[1501] DNA base editing has also been used to track cellular signaling events. Base editing is not well suited for lineage tracing due to the low number of outcome states generated by an editing event relative to the number of states generated by Cas9 indels; however, the pre-defined nature of the sequence modifications made by a base editor are particularly useful for tracking internal and external cellular stimuli. As described herein, either base editor or sgRNA expression can be connected to a particular biological or chemical stimulus. Base editing activity has been used to track a large number of individual stimuli in both mammalian and bacterial cells. This approach has also been used to track consecutive stimuli where a first editing event was necessary before a second edit could take place.

[1502] Base editing signal recording is an important first step for the field, but it has a number of limitations. One such limitation is that base editing exhausts its target after editing, limiting the dynamic range of the technique. This means that using endogenous targets for recording events is often difficult and limited to recording bulk activities instead of activity at the single cell level. An alternative to this is the introduction of a pre-designed repetitive recording locus though this has not been performed to date. There are also issues with two-signal recording. These two signal-recording experiments only report on the presence of the second stimulus after a first; it does not report which stimulus happened first or how long the stimuli were present. This fundamentally limits the biological understanding gleaned from the experiment.

[1503] It has been proposed that PE lineage tracing can do both lineage tracing and cellular signaling recording by modifying genomic target sequences as well as integrated pre-designed sequences. PE uses a synthetic fusion protein comprising a Cas9 nickase fragment (often the SpCas9 H840A variant) and a reverse transcriptase (RT) domain, along with an engineered prime editing guide RNA (PEgRNA). Together, these components target a specific genomic sequence and install a pre-determined edit. Since the PEgRNA specifies both the target genomic sequence and the editing outcome, highly specific and controlled genome modification can be achieved simultaneously using multiple PEgRNAs within the same cell. Accessible genome modifications include all single nucleotide substitution, small to medium size sequence insertions, and small to medium size sequence deletions. The versatility of this genome editing technology should enable temporally coupled, signal-specific recording within cells.

[1504] Utility of PE Lineage and Cell Signaling Recording

[1505] Recording cellular signaling can be accomplished in a number of ways. One important first application of this approach is to connect DNA modification events to cell cycle associated signals like the expression of cyclins, CDKs, or other proteins specific to phases of the cellular life span one could generate a cellular clock. A cellular clock allows researchers to understand the order of various signals being received and processed by individual cells. A molecular clock would also enable the determination of long-term signaling versus short-term bursts of signaling. Using prime editing components that can only edit once a cell cycle could also lead to a molecular clock. If editing can only proceed once a cell cycle without continued DNA modification (perhaps by not nicking the non-edited DNA strand) one could imagine a system that only can be edited by a second targeting PEsgRNA in a subsequent cell division. PE is particularly useful as a cellular clock as it can repeatedly insert, delete, or mutate loci in a predetermined way with insertions being particularly valuable as repeated, regular insertions can be made at any target genomic locus.

[1506] Another important application related to recording cellular signals is the parallel recording of a large number of cellular inputs. Linking cellular signaling events to DNA modification enables recording of whether such a signaling event has occurred. Similar to Cas9 nuclease-based or base editing-based recording systems, recording of cellular events can be tethered to gRNA or editor expression. Unlike these other approaches, lineage prime editing should be able to record the order, intensity, and duration of signaling events without requiring strict sequence motifs for ordered editing. Indeed, lineage prime editing should be able to integrate the cellular counter described above with signal specific insertions, deletions, or mutations to study the order, intensity, and duration of biological signals. Due to the programmable nature of prime editing, this approach can be achieved at genomic loci pre-existing in the target cell of interest (whether this is in bacteria, mice, rats, monkeys, pigs, humans, zebrafish, C. elegans, etc.). It is important to note as well that prime editing recording installs barcodes in a guide RNA dependent manner, the number of inputs is limited to the number of signals for which there are reliable signal specific guide RNA expression cassettes (which should be very high due to the ability to tether these expressions to the activity of RNA Pol II promoters). The number of recordable signals scales linearly with the number of PEgRNAs needed.

[1507] PE can also be used to trace cellular lineages. Repeated sequence modification can be used to generate unique cellular barcodes to track individual cells. The arrays of barcodes, their order, and size can all be used to infer cellular lineages in a way that can be complementary to the large number of indel states generated by Cas9 nuclease.

[1508] Prime Editing Methodology for Repeated Sequence Modification

[1509] A number of distinct modalities for repeated sequence modification using prime editing (PE) were envisioned: DNA mutagenesis; sequence deletion; and, sequence insertion. Notably, these applications can be used on either pre-existing genomic DNA targets or on pre-designed DNA sequences that researchers integrate into target cells. These techniques of serial sequence modification have value for recording information and for designed or stochastic modification of target loci in a continuous manner. Serial targeted locus modification may be particularly useful for generating libraries of variants in various hosts.

[1510] Repeated sequence mutation can be used to alter either genomic DNA or pre-designed integrated DNA sequences in an iterative manner to report on cellular signaling events. In this paradigm, mutations installed by PE gRNA activity will correspond to the presence of a cellular signal. These point mutations could install PAM motifs necessary for serial editing events, as well as point mutations that correspond to the presence of specific signals. This system would require gRNA design prior to use as each successive guide RNA will use a novel protospacer; however, it could be especially powerful for examining individual or small numbers of stimuli of particular interest. Installation of these mutations could be dependent on individual biological stimuli or could be connected to consistent cellular processes that would mark cellular time. The sequences below correspond to SEQ ID NOs: 743, 744, 744, and 745.

| | |
|---|---|
| Target genomic DNA sequence | CGTATCGGTAACTGATCCGATGGAAAGCCAGTTCAGAACCG |
| Target sequence post edit #1 (install [symbol] and [symbol] ) | CGTATCGGTAACTGATCCGATGGAA [symbol] GCCAG [symbol] ICAGAACCG |
| Target sequence post edit #1 (use [symbol] PAM) | CGTATCGGTAACTGATCCGATGGAA [symbol] GCCAGGTCAGAACCG |
| Target sequence post edit #2 (install [symbol] and [symbol] ) | CGTATCGGTAACTGATCCGATGGAA [symbol] GCCAGGTCA [symbol] AAC [symbol] G |

[1511] Another similar PE guide RNA-intensive method is the repeated deletion of target sequences. Removal of individual sequences from a target locus would allow for the ability to reconstruct signaling events through the loss of DNA motifs. Design of PEgRNAs that delete successive sequences would enable the tracking of consecutive signals. This would allow researchers to identify instances where one signal followed another, which would allow researchers to probe which signaling events happen in which order. Such a system has been tested using CAMERA; however, this required pre-selection of particular loci with unique sequence requirements. Successive sequence deletion using PE would allow for the paralleled recording of pairwise events in individual cells as no specific sequence determinants are required. This would allow researchers the ability to probe pairwise signaling events in a multiplexed manner inside any target cell of interest. The sequences below correspond to SEQ ID NOs: 746, 747, and 748.

| | |
|---|---|
| Example target DNA sequence | CGTATCGGTAACTGATCCGATGGAAAGCCAGTTCAGAACCG |
| Target sequence post edit #1 (delete AAA) | CGTATCGGTAACTGATCCGATGGGCCAGTTCAGAACCG |
| Target sequence post edit #2 (delete GCC) | CGTATCGGTAACTGATCCGATGGAGTTCAGAACCG |

[1512] Sequence insertion is a third approach for the tracking cellular signaling events. Some variants of this strategy are less PEgRNA-dependent than mutagenesis or deletion. A number of different insertion strategies exist-insertion of short sequences, insertion of protospacers, insertion of a protospacer and a barcode, insertion of novel homology sequences, and insertion of homology sequences with a barcode.

[1513] Insertion of short repetitive sequences is a way to incrementally increase the size of a target sequence to measure the passage of time in a cell. In this system insertion of 5 or more nucleotides of repetitive sequence can cause repeat expansion in connection to either the passage of time or the continued presence of a pre-determined stimulus. The locus-agnostic nature of lineage PE again enables paralleled tracking of multiple unique sequence expansions in connection with discrete biological signals. This should enable measuring of the intensity of multiple biological signals across cellular time in individual cells. The sequences below correspond to SEQ ID NOs: 749, 750, and 751.

| | |
|---|---|
| Example target DNA sequence | genomic sequence-CGTATCGTATCGTATCGTATTGG-denomic sequence |
| Target sequence post edit #1 | genomic sequence-CGTASICGTATCGTATCGTATCGTATTGG-genomic sequence |
| (install CGTAT) | |
| Target sequence post edit #2 | genomic sequence-CGTATCGTATCGTATCGTATCGTATCGTATTGG-genomic sequence |
| (install CGTAT) | |

[1514] Insertion of different short sequences would require a handful of PEgRNAs in a manner similar to the deletional space. The number of signals being recorded and the size of the inserted sequence would determine the number of combinations of PEgRNAs needed. One challenge with recording multiple sequences in this system would be the different efficiencies of each PEgRNA at inserting its cargo sequence.

[1515] Insertion of protospacers as indicators of cellular signals is enticing though technical challenges may infringe on the efficiency of this approach. Single PEgRNA systems will be challenging to use because PEgRNA cassettes would be substrates for themselves, causing insertions into the PEgRNA that compromise the efficiency and fidelity of successive edits. This same problem persists for two or three PEgRNA systems, as each guide is a substrate for another, enabling insertion of other sequences into the guide cassette itself, which could lead to inappropriate insertion of protospacer sequences in connection with the wrong signal. These protospacer insertion systems are also difficult to imagine with the inclusion of barcode sequences. Single PEgRNA barcode systems would simply write over the barcodes used, removing the data stored in the first edit. Multiple guide systems again suffer from insertions into other PEgRNA expression constructs, limiting its utility (especially in vivo). The sequences below correspond to SEQ ID NOs: 752, 752, 753, 754, 754, 755, and 756.

| Example target DNA | CGTATCGGTAACTGATCCGATGGAAA |
|---|---|
| sequence | ▾ |
| Example target DNA | CGTATCGGTAACTGATCCGATGGAAA |
| sequence edited with lineage PE guide #1 | [chemical structure] |
| Target DNA after editing | CGTATCGGTAACTGATCTCCTGGCCC-BC1-CGATGGAAA |
| with lineage PE guide #1 | |
| | ▾ |
| Target DNA after editing | CGTATCGGTAACTGATCTCCTGGCCC-BC1-CGATGGAAA |
| with lineage PE guide #1 | |
| edited with | |
| lineage PE guide #2 | [chemical structure] |
| Target DNA after editing | CGTATCGGTAACTGATCCGATGGAAA-BC2-TCCTGGCCC-BC1-CGATGGAAA |
| with lineage PE guide #1 | |
| and with lineage PE guide | |
| #2 | |

[1516] Insertion of homology sequences (i.e., sequences 3′ of the Cas9 nick location), and especially homology sequences with associated barcodes, appear to be particularly useful lineage PE strategies. This system avoids the issues associated with protospacer insertion by ensuring that successive rounds of editing result in the insertion of a barcode from a PEgRNA cassette that cannot be modified by other PEgRNA editing events in the same cell. The barcoding system is valuable as multiple barcodes can be associated with a given stimulus. This system preserves the majority of the target protospacer but alters the seed sequence, PAM, and downstream adjacent nucleotides. This enables multiple signals to be connected to one editing locus without significant re-designing of the PEgRNAs being used. This strategy would enable multiplexed barcode insertion in response to a large number of cellular stimuli (either internal or external) at a single locus. It could enable recording of intensity, duration, and order of as many signals as there exist unique barcodes (which can be designed with multiple N nucleotides to generate 4^{A}N possible barcodes; i.e. a 5-nt barcode would enable recording of 4^{A5} or 1024 unique signals at once). This system could be used both in vitro and in vivo.

### References Cited in Example 13

[1517] Each of the following references are incorporated herein by reference.
[1518] 1. Recording development with single cell dynamic lineage tracing. Aaron McKenna, James A. Gagnon.
[1519] 2. Whole-organism lineage tracing by combinatorial and cumulative genome editing.Mckenna et al. Science. 2016 Jul. 29; 353(6298):aaf7907. doi10.1126/science.aaf7907. Epub 2016 May 26.
[1520] 3. Molecular recording of mammalian embryogenesis. Chan et al. 2019. Nature. June; 570(7759):77-82. doi: 10.1038/s41586-019-1184-5. Epub 2019 May 13.

### Example 14—Modulating Biomolecule Activity and/or Localization by PE

[1521] The subcellular localization and modification states of biomolecules regulate their activities. Specific biological functions like transcriptional control, cellular metabolism, and signal transduction cascades are all carefully orchestrated in particular locations within the cell. As such, modulating the cellular localization and modification states of proteins represents a potential therapeutic strategy for the treatment of disease. Some existing therapeutics have been developed to alter the localization of target proteins. For example, farnesylation inhibitors are designed to prevent lipidation and membrane targeting of important oncogenic proteins like KRAS. Similarly, small-molecule-induced ubiquitination of target proteins directs them to the proteasome for degradation. The ability to traffic proteins to these and other unique cellular compartments provides an opportunity to alter a number of biological processes. It is proposed herein that the use of prime editing (PE) to install genetically encoded handles for altering the modification state and the subcellular trafficking of biomolecules with a genetically encoded signal (e.g. proteins, lipids, sugars, and nucleic acids) for the purposes of therapeutics.

[1522] PE is a genome editing technology that enables the installation, deletion, or replacement of short DNA sequences into any genomic locus targetable with a Cas9 enzyme. Using this technology, one could in principle install or remove important DNA, RNA, or protein coding sequences that change the activities of these important biomolecules. More specifically, prime editing could be used to install motifs, or signals, that change the localization or modification properties of biomolecules. Some examples include modification to: protein amino acid sequences; motifs for post translational modifications; RNA motifs that change folding or localization; and, installation of DNA sequences that change the local chromatin state or architecture of the surrounding DNA.

[1523] One target biomolecule for PE-mediated modification is DNA. Modifications to DNA could be made to install a number of DNA sequences that change the accessibility of the target locus. Chromatin accessibility controls gene transcriptional output. Installation of marks to recruit chromatin compacting enzymes should decrease the transcriptional output of neighboring genes, while installation of sequences associated with chromatin opening should make regions more accessible and in turn increase transcription. Installation of more complex sequence motifs that mirror native regulatory sequences should provide more nuanced and biologically sensitive control than the currently available dCas9 fusions to different epigenetic reader, writer, or eraser enzymes-tools that typically install large numbers of a single type of mark that may not have a particular biological antecedent. Installation of sequences that will bring two loci into close proximity, or bring loci into contact with the nuclear membrane, should also alter the transcriptional output of those loci as has been demonstrated in the burgeoning field of 3-D genomic architecture.

[1524] Modifications to RNAs can also be made to alter their activity by changing their cellular localization, interacting partners, structural dynamics, or thermodynamics of folding. Installation of motifs that will cause translational pausing or frameshifting could change the abundance of mRNA species through various mRNA processing mechanisms. Modifying consensus splice sequences would also alter the abundance and prevalence of different RNA species. Changing the relative ratio of different splice isoforms would predictably lead to a change in the ratio of protein translation products, and this could be used to alter many biological pathways. For instance, shifting the balance of mitochondrial versus nuclear DNA repair proteins would alter the resilience of different cancers to chemotherapeutic reagents. Furthermore, RNAs could be modified with sequences that enable binding to novel protein targets. A number of RNA aptamers have been developed that bind with high affinity to cellular proteins. Installation of one of these aptamers could be used to either sequester different RNA species through binding to a protein target that will prevent their translation, biological activity, or to bring RNA species to specific subcellular compartments. Biomolecule degradation is another class of localization modification. For example, RNA methylation is used to regulate RNAs within the cell. Consensus motifs for methylation could be introduced into target RNA coding sequences with PE. RNAs could also be modified to include sequences that direct nonsense mediated decay machinery or other nucleic acid metabolism pathways to degrade the target RNA species would change the pool of RNAs in a cell. Additionally, RNA species could be modified to alter their aggregation state. Sequences could be installed on single RNAs of interest or multiple RNAs to generate RNA tangles that would render them ineffective substrates for translation or signaling.

[1525] Modifications to proteins via post-translational modification (PTM) also represent an important class of biomolecule manipulation that can be carried out with PE. As with RNA species, changing the abundance of proteins in a cell is an important capability of PE. Editing can be done to install stop codons in an open reading frame—this will eliminate full-length product from being produced by the edited DNA sequence. Alternatively, peptide motifs can be installed that cause the rate of protein degradation to be altered for a target protein. Installation of degradation tags into a gene body could be used to alter the abundance of a protein in a cell. Moreover, introduction of degrons that are induced by small molecules could enable temporal control over protein degradation. This could have important implications for both research and therapeutics as researchers could readily assess whether small molecule-mediated therapeutic protein degradation of a given target was a viable therapeutic strategy. Protein motifs could also be installed to change the subcellular localization of a protein. Amino acid motifs can be installed to preferentially traffic proteins to a number of subcellular compartments including the nucleus, mitochondria, cell membrane, peroxisome, lysosome, proteasome, exosome, and others.

[1526] Installing or destroying motifs modified by PTM machinery can alter protein post-translational modifications. Phosphorylation, ubiquitylation, glycosylation, lipidation (e.g. farnesylation, myristoylation, palmitoylation, prenylation, GPI anchors), hydroxylation, methylation, acetylation, crotonylation, SUMOylation, disulfide bond formations, side chain bond cleavage events, polypeptide backbone cleavage events (proteolysis), and a number of other protein PTMs have been identified. These PTMs change protein function, often by changing subcellular localization. Indeed, kinases often activate downstream signaling cascades via phosphorylation events. Removal of the target phosphosite would prevent signal transduction. The ability to site-specifically ablate or install any PTM motif while retaining full-length protein expression would be an important advance for both basic research and therapeutics. The sequence installation scope and target window of PE make it well suited for broad PTM modification space.

[1527] Removal of lipidation sites should prevent the trafficking of proteins to cell membranes. A major limitation to current therapeutics that target post-translational modification processes is their specificity. Farnesyl transferase inhibitors have been tested extensively for their ability to eliminate KRAS localization at cell membranes. Unfortunately, global inhibition of farnesylation comes with numerous off target effects that have prevented broad use of these small molecules. Similarly, specific inhibition of protein kinases with small molecules can be very challenging due to the large size of the human genome and similarities between various kinases. PE offers a potential solution to this specificity problem, as it enables inhibition of modification of the target protein by ablation of the modification site instead of global enzyme inhibition. For example, removal of the lapidated peptide motif in KRAS would be a targeted approach that could be used in place of farnesyl transferase inhibition. This approach is the functional inverse of inhibiting a target protein activity by installing a lipid-targeting motif on a protein not designed to be membrane bound.

[1528] PE can also be used to instigate protein-protein complexation events. Proteins often function within complexes to execute their biological activity. PE can be used to either create or destroy the ability of proteins to exist within these complexes. To eliminate complex formation events, amino acid substitutions or insertions along the protein: protein interface could be installed to disfavor complexation. SSX18 is a protein component of the BAF complex, an important histone-remodeling complex. Mutations in SSX18 drive synovial sarcomas. PE could be used to install side chains that prevent SSX18 from binding to its protein partners in the complex to prevent its oncogenic activity. PE could also be used to remove the pathogenic mutations to restore WT activity of this protein. Alternatively, PE could be used to keep proteins within either their native complex or to drag them to participate in interactions that are unrelated to their native activity to inhibit their activity. Forming complexes that maintain one interaction state over another could represent an important therapeutic modality. Altering protein: protein interfaces to decrease the Kd of the interaction would keep those proteins stuck to one another longer. As protein complexes can have multiple signaling complexes, like n-myc driving neuroblastoma signaling cascades in disease but otherwise participating in healthy transcriptional control in other cells. PE could be used to install mutations that drive n-myc association with healthy interactions partners and decrease its affinity for oncogenic interaction partners.

### References Cited in Example 14

[1529] Each of the following references are incorporated herein by reference.
[1530] 1. Selective Target Protein Degradation via Phthalimide Conjugation. Winter et al. Science. Author manuscript; available in PMC 2016 Jul. 8.
[1531] 2. Reversible disruption of mSWI/SNF (BAF) complexes by the SS18-SSX oncogenic fusion in synovial sarcoma. Kadoch and Crabtree. Cell. 2013 Mar. 28; 153(1):71-85. doi: 10.1016/j.cell.2013.02.036.
[1532] 3. Ribosomal frameshifting and transcriptional slippage: From genetic steganography and cryptography to adventitious use. Atkins et al. Nucleic Acids Research, Volume 44, Issue 15, 6 Sep. 2016, Pages 7007-7078.
[1533] 4. Transcriptional Regulation and its Misregulation in Disease. Lee and Young. Cell. Author manuscript; available in PMC 2014 Mar. 14.
[1534] 5. Protein localization in disease and therapy. Mien-Chie Hung, Wolfgang Link Journal of Cell Science 2011 124: 3381-3392.
[1535] 6. Loss of post-translational modification sites in disease. Li et al. Pac Symp Biocomput. 2010:337-47. PTMD: A Database of Human Disease-associated Post-translational Modifications. Xu et al. Genomics Proteomics Bioinformatics. 2018 August; 16(4):244-251. Epub 2018 Sep. 21.
[1536] 7. Post-transcriptional gene regulation by mRNA modifications. Zhao et al. Nature Reviews Molecular Cell Biology volume 18, pages 31-42 (2017).

### Example 15—Design and Engineering of PEgRNAs

[1537] Described herein is a series of PEgRNA designs and strategies that can improve prime editing (PE) efficiency.

[1538] Prime editing (PE) is a genome editing technology that can replace, insert, or remove defined DNA sequences within a targeted genetic locus using information encoded within a prime editing guide RNA (PEgRNA). Prime editors (PEs) consist of a sequence-programmable DNA binding protein with nuclease activity (Cas9) fused to a reverse transcriptase (RT) enzyme. PEs form complexes with PEgRNAs, which contain the information for targeting specific DNA loci within their spacer sequences, as well as information specifying the desired edit in an engineered extension built into a standard sgRNA scaffold. PE:PEgRNA complexes bind and nick the programmed target DNA locus, allowing hybridization of the nicked DNA strand to the engineered primer binding sequence (PBS) of the PEgRNA. The reverse transcriptase domain then copies the edit-encoding information within the RT template portion of the PEgRNA, using the nicked genomic DNA as a primer for DNA polymerization. Subsequent DNA repair processes incorporate the newly synthesized edited DNA strand into the genomic locus. While the versatility of prime editing holds great promise as a research tool and potential therapeutic, several limitations in efficiency and scope exist due to the multi-step process required for editing. For example, unfavorable RNA structures that form within the PEgRNA can inhibit the copying of DNA edits from the PEgRNA to the genomic locus. One potential way to improve PE technology is through redesign and engineering of the critical PEgRNA component. Improvements to the design of these PEgRNAs are likely to be necessary for improved PE efficiency, as well as enable installation of longer inserted sequences into the genome.

[1539] Described herein is a series of PEgRNA designs that are envisioned to improve the efficacy of PE. These designs take advantage of a number of previously published approaches for improving sgRNA efficacy and/or stability, as well as utilize a number of novel strategies. These improvements can belong to one or more of a number of different categories:

[1540] (1) Longer PEgRNAs. This category relations to improved designs that enable efficient expression of functional PEgRNAs from non-polymerase III (pol III) promoters, which would enable the expression of longer PEgRNAs without burdensome sequence requirements;

[1541] (2) Core improvements. This category relates to improvements to the core, Cas9-binding PEgRNA scaffold, which could improve efficacy;

[1542] (3) RT processivity. This category relates to modifications to the PEgRNA that improve RT processivity, enabling the insertion of longer sequences at targeted genomic loci; and

[1543] (4) Termini motifs. This category relates to the addition of RNA motifs to the 5′ and/or 3′ termini of the PEgRNA that improve PEgRNA stability, enhance RT processivity, prevent mis-folding of the PEgRNA, or recruit additional factors important for genome editing.

[1544] Described herein are a number of potential such PEgRNA designs in each category. Several of these designs have been previously described for improving sgRNA activity with Cas9 and are indicated as such. Described herein is also a platform for the evolution of PEgRNAs for given sequence targets that would enable the polishing of the PEgRNA scaffold and enhance PE activity (5). Notably, these designs could also be readily applied to improve PEgRNAs recognized by any Cas9 or evolved variant thereof.

[1545] (1) Longer PEgRNAs.

[1546] sgRNAs are typically expressed from the U6 snRNA promoter. This promoter recruits pol III to express the associated RNA and is useful for expression of short RNAs that are retained within the nucleus. However, pol III is not highly processive and is unable to express RNAs longer than a few hundred nucleotides in length at the levels required for efficient genome editing¹⁸³. Additionally, pol III can stall or terminate at stretches of U's, potentially limiting the sequence diversity that could be inserted using a PEgRNA. Other promoters that recruit polymerase II (such as pCMV) or polymerase I (such as the U1 snRNA promoter) have been examined for their ability to express longer sgRNAs¹⁸³. However, these promoters are typically partially transcribed, which would result in extra sequence 5′ of the spacer in the expressed PEgRNA, which has been shown to result in markedly reduced Cas9:sgRNA activity in a site-dependent manner. Additionally, while pol III-transcribed PEgRNAs can simply terminate in a run of 6-7 U's, PEgRNAs transcribed from pol II or pol I would require a different termination signal. Often such signals also result in polyadenylation, which would result in undesired transport of the PEgRNA from the nucleus. Similarly, RNAs expressed from pol II promoters such as pCMV are typically 5′-capped, also resulting in their nuclear export.

[1547] Previously, Rinn and coworkers screened a variety of expression platforms for the production of long-noncoding RNA-(lncRNA) tagged sgRNAs¹⁸³. These platforms include RNAs expressed from pCMV and that terminate in the ENE element from the MALAT1 ncRNA from humans¹⁸⁴, the PAN ENE element from KSHV¹⁸⁵, or the 3′ box from U1 snRNA¹⁸⁶. Notably, the MALAT1 ncRNA and PAN ENEs form triple helices protecting the polyA-tail^{184, 187}. It is anticipated that, in addition to enabling expression of RNAs, these constructs could also enhance RNA stability (see section iv). Using the promoter from the U1 snRNA to enable expression of these longer sgRNAs¹⁸³ was also explored. It is anticipated that these expression systems will also enable the expression of longer PEgRNAs. In addition, a series of methods have been designed for the cleavage of the portion of the pol II promoter that would be transcribed as part of the PEgRNA, adding either a self-cleaving ribozyme such as the hammerhead¹⁸⁸, pistol¹⁸⁹, hatchet¹⁸⁹, hairpin¹⁹⁰, VS¹⁹¹, twister¹⁹², or twister sister¹⁹² ribozymes, or other self-cleaving elements to process the transcribed guide, or a hairpin that is recognized by Csy4¹⁹³ and also leads to processing of the guide. Also, it is hypothesized that incorporation of multiple ENE motifs could lead to improved PEgRNA expression and stability, as previously demonstrated for the KSHV PAN RNA and element¹⁸⁵. It is also anticipated that circularizing the PEgRNA in the form of a circular intronic RNA (ciRNA) could also lead to enhanced RNA expression and stability, as well as nuclear localization¹⁹⁴.

PEgRNA expression platform consisting of pCMV, Csy4
hairping, the PEgRNA, and MALAT1 ENE
(SEQ ID NO: 757)
TAGTTATTAATAGTAATCAATTACGGGGTCATTAGTTCATAGCCCATATAT
GGAGTTCCGCGTTACATAACTTACGGTAAATGGCCCGCCTGGCTGACCGCC
CAACGACCCCCGCCCATTGACGTCAATAATGACGTATGTTCCCATAGTAAC
GCCAATAGGGACTTTCCATTGACGTCAATGGGTGGAGTATTTACGGTAAAC
TGCCCACTTGGCAGTACATCAAGTGTATCATATGCCAAGTACGCCCCCTAT
TGACGTCAATGACGGTAAATGGCCCGCCTGGCATTATGCCCAGTACATGAC
CTTATGGGACTTTCCTACTTGGCAGTACATCTACGTATTAGTCATCGCTAT
TACCATGGTGATGCGGTTTTGGCAGTACATCAATGGGCGTGGATAGCGGTT
TGACTCACGGGGATTTCCAAGTCTCCACCCCATTGACGTCAATGGGAGTTT
GTTTTGGCACCAAAATCAACGGGACTTTCCAAAATGTCGTAACAACTCCGC
CCCATTGACGCAAATGGGCGGTAGGCGTGTACGGTGGGAGGTCTATATAAG
CAGAGCTGGTTTAGTGAACCGTCAGATCGTTCACTGCCGTATAGGCAGGGC
CCAGACTGAGCACGTGAGTTTTAGAGCTAGAAATAGCAAGTTAAAATAAGG
CTAGTCCGTTATCAACTTGAAAAAGTGGGACCGAGTCGGTCCTCTGCCATC
AAAGCGTGCTCAGTCTGTTTTAGGGTCATGAAGGTTTTTCTTTTCCTGAGA
AAACAACACGTATTGTTTTCTCAGGTTTTGCTTTTTGGCCTTTTTCTAGCT
TAAAAAAAAAAAAAGCAAAAGATGCTGGTGGTTGGCACTCCTGGTTTCCAG
GACGGGGTTCAAATCCCTGCGGCGTCTTTGCTTTGACT
PEgRNA expression platform consisting of pCMV, Csy4
hairping, the PEgRNA, and PAN ENE
(SEQ ID NO: 758)
TAGTTATTAATAGTAATCAATTACGGGGTCATTAGTTCATAGCCCATATAT
GGAGTTCCGCGTTACATAACTTACGGTAAATGGCCCGCCTGGCTGACCGCC
CAACGACCCCCGCCCATTGACGTCAATAATGACGTATGTTCCCATAGTAAC
GCCAATAGGGACTTTCCATTGACGTCAATGGGTGGAGTATTTACGGTAAAC
TGCCCACTTGGCAGTACATCAAGTGTATCATATGCCAAGTACGCCCCCTAT
TGACGTCAATGACGGTAAATGGCCCGCCTGGCATTATGCCCAGTACATGAC
CTTATGGGACTTTCCTACTTGGCAGTACATCTACGTATTAGTCATCGCTAT
TACCATGGTGATGCGGTTTTGGCAGTACATCAATGGGCGTGGATAGCGGTT
TGACTCACGGGGATTTCCAAGTCTCCACCCCATTGACGTCAATGGGAGTTT
GTTTTGGCACCAAAATCAACGGGACTTTCCAAAATGTCGTAACAACTCCGC
CCCATTGACGCAAATGGGCGGTAGGCGTGTACGGTGGGAGGTCTATATAAG
CAGAGCTGGTTTAGTGAACCGTCAGATCGTTCACTGCCGTATAGGCAGGGC
CCAGACTGAGCACGTGAGTTTTAGAGCTAGAAATAGCAAGTTAAAATAAGG
CTAGTCCGTTATCAACTTGAAAAAGTGGGACCGAGTCGGTCCTCTGCCATC
AAAGCGTGCTCAGTCTGTTTTGTTTTGGCTGGGTTTTTCCTTGTTCGCACC
GGACACCTCCAGTGACCAGACGGCAAGGTTTTTATCCCAGTGTATATTGGA
AAAACATGTTATACTTTTGACAATTTAACGTGCCTAGAGCTCAAATTAAAC
TAATACCATAACGTAATGCAACTTACAACATAAATAAAGGTCAATGTTTAA
TCCATAAAAAAAAAAAAAAAAAAA
PEgRNA expression platform consisting of pCMV, Csy4
hairping, the PEgRNA, and 3xPAN ENE
(SEQ ID NO: 759)
TAGTTATTAATAGTAATCAATTACGGGGTCATTAGTTCATAGCCCATATAT
GGAGTTCCGCGTTACATAACTTACGGTAAATGGCCCGCCTGGCTGACCGCC
CAACGACCCCCGCCCATTGACGTCAATAATGACGTATGTTCCCATAGTAAC
GCCAATAGGGACTTTCCATTGACGTCAATGGGTGGAGTATTTACGGTAAAC
TGCCCACTTGGCAGTACATCAAGTGTATCATATGCCAAGTACGCCCCCTAT
TGACGTCAATGACGGTAAATGGCCCGCCTGGCATTATGCCCAGTACATGAC
CTTATGGGACTTTCCTACTTGGCAGTACATCTACGTATTAGTCATCGCTAT
TACCATGGTGATGCGGTTTTGGCAGTACATCAATGGGCGTGGATAGCGGTT
TGACTCACGGGGATTTCCAAGTCTCCACCCCATTGACGTCAATGGGAGTTT
GTTTTGGCACCAAAATCAACGGGACTTTCCAAAATGTCGTAACAACTCCGC
CCCATTGACGCAAATGGGCGGTAGGCGTGTACGGTGGGAGGTCTATATAAG
CAGAGCTGGTTTAGTGAACCGTCAGATCGTTCACTGCCGTATAGGCAGGGC
CCAGACTGAGCACGTGAGTTTTAGAGCTAGAAATAGCAAGTTAAAATAAGG
CTAGTCCGTTATCAACTTGAAAAAGTGGGACCGAGTCGGTCCTCTGCCATC
AAAGCGTGCTCAGTCTGTTTTGTTTTGGCTGGGTTTTTCCTTGTTCGCACC
GGACACCTCCAGTGACCAGACGGCAAGGTTTTTATCCCAGTGTATATTGGA
AAAACATGTTATACTTTTGACAATTTAACGTGCCTAGAGCTCAAATTAAAC
TAATACCATAACGTAATGCAACTTACAACATAAATAAAGGTCAATGTTTAA
TCCATAAAAAAAAAAAAAAAAAAAACACACTGTTTTGGCTGGGTTTTTCCT
TGTTCGCACCGGACACCTCCAGTGACCAGACGGCAAGGTTTTTATCCCAGT
GTATATTGGAAAAACATGTTATACTTTTGACAATTTAACGTGCCTAGAGCT
CAAATTAAACTAATACCATAACGTAATGCAACTTACAACATAAATAAAGGT
CAATGTTTAATCCATAAAAAAAAAAAAAAAAAAATCTCTCTGTTTTGGCTG
GGTTTTTCCTTGTTCGCACCGGACACCTCCAGTGACCAGACGGCAAGGTTT
TTATCCCAGTGTATATTGGAAAAACATGTTATACTTTTGACAATTTAACGT
GCCTAGAGCTCAAATTAAACTAATACCATAACGTAATGCAACTTACAACAT
AAATAAAGGTCAATGTTTAATCCATAAAAAAAAAAAAAAAAAAA
PEgRNA expression platform consisting of pCMV, Csy4
hairping, the PEgRNA, and 3′ box
(SEQ ID NO: 760)
TAGTTATTAATAGTAATCAATTACGGGGTCATTAGTTCATAGCCCATATAT
GGAGTTCCGCGTTACATAACTTACGGTAAATGGCCCGCCTGGCTGACCGCC
CAACGACCCCCGCCCATTGACGTCAATAATGACGTATGTTCCCATAGTAAC
GCCAATAGGGACTTTCCATTGACGTCAATGGGTGGAGTATTTACGGTAAAC
TGCCCACTTGGCAGTACATCAAGTGTATCATATGCCAAGTACGCCCCCTAT
TGACGTCAATGACGGTAAATGGCCCGCCTGGCATTATGCCCAGTACATGAC
CTTATGGGACTTTCCTACTTGGCAGTACATCTACGTATTAGTCATCGCTAT
TACCATGGTGATGCGGTTTTGGCAGTACATCAATGGGCGTGGATAGCGGTT
TGACTCACGGGGATTTCCAAGTCTCCACCCCATTGACGTCAATGGGAGTTT
GTTTTGGCACCAAAATCAACGGGACTTTCCAAAATGTCGTAACAACTCCGC
CCCATTGACGCAAATGGGCGGTAGGCGTGTACGGTGGGAGGTCTATATAAG
CAGAGCTGGTTTAGTGAACCGTCAGATCGTTCACTGCCGTATAGGCAGGGC
CCAGACTGAGCACGTGAGTTTTAGAGCTAGAAATAGCAAGTTAAAATAAGG
CTAGTCCGTTATCAACTTGAAAAAGTGGGACCGAGTCGGTCCTCTGCCATC
AAAGCGTGCTCAGTCTGTTTGTTTCAAAAGTAGACTGTACGCTAAGGGTCA
TATCTTTTTTTGTTTGGTTTGTGTCTTGGTTGGCGTCTTAAA
PEgRNA expression platform consisting of pU1, Csy4
hairping, the PEgRNA, and 3′ box
(SEQ ID NO: 761)
CTAAGGACCAGCTTCTTTGGGAGAGAACAGACGCAGGGGCGGGAGGGAAAA
AGGGAGAGGCAGACGTCACTTCCCCTTGGCGGCTCTGGCAGCAGATTGGTC
GGTTGAGTGGCAGAAAGGCAGACGGGGACTGGGCAAGGCACTGTCGGTGAC
ATCACGGACAGGGCGACTTCTATGTAGATGAGGCAGCGCAGAGGCTGCTGC
TTCGCCACTTGCTGCTTCACCACGAAGGAGTTCCCGTGCCCTGGGAGCGGG
TTCAGGACCGCTGATCGGAAGTGAGAATCCCAGCTGTGTGTCAGGGCTGGA
AAGGGCTCGGGAGTGCGCGGGGCAAGTGACCGTGTGTGTAAAGAGTGAGGC
GTATGAGGCTGTGTCGGGGCAGAGGCCCAAGATCTCAGTTCACTGCCGTAT
AGGCAGGGCCCAGACTGAGCACGTGAGTTTTAGAGCTAGAAATAGCAAGTT
AAAATAAGGCTAGTCCGTTATCAACTTGAAAAAGTGGGACCGAGTCGGTCC
TCTGCCATCAAAGCGTGCTCAGTCTGTTTCAGCAAGTTCAGAGAAATCTGA
ACTTGCTGGATTTTTGGAGCAGGGAGATGGAATAGGAGCTTGCTCCGTCCA
CTCCACGCATCGACCTGGTATTGCAGTACCTCCAGGAACGGTGCACCCACT
TTCTGGAGTTTCAAAAGTAGACTGTACGCTAAGGGTCATATCTTTTTTTGT
TTGGTTTGTGTCTTGGTTGGCGTCTTAAA

[1548] The core, Cas9-binding PEgRNA scaffold can likely be improved to enhance PE activity. Several such approaches have already been demonstrated. For instance, the first pairing element of the scaffold (P1) contains a GTTTT-AAAAC (SEQ ID NO: 3939) pairing element. Such runs of Ts have been shown to result in pol III pausing and premature termination of the RNA transcript. Rational mutation of one of the T-A pairs to a G-C pair in this portion of P1 has been shown to enhance sgRNA activity, suggesting this approach would also be feasible for PEgRNAs¹⁹⁵. Additionally, increasing the length of P1 has also been shown to enhance sgRNA folding and lead to improved activity¹⁹⁵, suggesting it as another avenue for the improvement of PEgRNA activity. Finally, it is likely the polishing of the PEgRNA scaffold through directed evolution of PEgRNAs on a given DNA target would also result in improved activity. This is described in section (v).

PEgRNA containing a 6 nt extension to P1
(SEQ ID NO: 228)
GGCCCAGACTGAGCACGTGAGTTTTAGAGCTAGCTCATGAAAATGAGCTAG
CAAGTTAAAATAAGGCTAGTCCGTTATCAACTTGAAAAAGTGGGACCGAGT
CGGTCCTCTGCCATCAAAGCGTGCTCAGTCTGTTTTTTT
PEgRNA containing a T-A to G-C mutation within P1
(SEQ ID NO: 229)
GGCCCAGACTGAGCACGTGAGTTTGAGAGCTAGAAATAGCAAGTTTAAATA
AGGCTAGTCCGTTATCAACTTGAAAAAGTGGGACCGAGTCGGTCCTCTGCC
ATCAAAGCGTGCTCAGTCTGTTTTTTT

[1549] (iii) Improvement of RT Processivity Via Modifications to the Template Region of the PEgRNA

[1550] As the size of the insertion templated by the PEgRNA increases, it is more likely to be degraded by endonucleases, undergo spontaneous hydrolysis, or fold into secondary structures unable to be reverse-transcribed by the RT or that disrupt folding of the PEgRNA scaffold and subsequent Cas9-RT binding. Accordingly, it is likely that modification to the template of the PEgRNA might be necessary to affect large insertions, such as the insertion of whole genes. Some strategies to do so include the incorporation of modified nucleotides within a synthetic or semi-synthetic PEgRNA that render the RNA more resistant to degradation or hydrolysis or less likely to adopt inhibitory secondary structures¹⁹⁶. Such modifications could include 8-aza-7-deazaguanosine, which would reduce RNA secondary structure in G-rich sequences; locked-nucleic acids (LNA) that reduce degradation and enhance certain kinds of RNA secondary structure; 2′-O-methyl, 2′-fluoro, or 2′-O-methoxyethoxy modifications that enhance RNA stability. Such modifications could also be included elsewhere in the PEgRNA to enhance stability and activity. Alternatively or additionally, the template of the PEgRNA could be designed such that it both encodes for a desired protein product and is also more likely to adopt simple secondary structures that are able to be unfolded by the RT. Such simple structures would act as a thermodynamic sink, making it less likely that more complicated structures that would prevent reverse transcription would occur. Finally, one could also imagine splitting the template into two, separate PEgRNAs. In such a design, a PE would be used to initiate transcription and also recruit a separate template RNA to the targeted site via an RNA-binding protein fused to Cas9 or an RNA recognition element on the PEgRNA itself such as the MS2 aptamer. The RT could either directly bind to this separate template RNA, or initiate reverse transcription on the original PEgRNA before swapping to the second template. Such an approach could enable long insertions by both preventing mis-folding of the PEgRNA upon addition of the long template and also by not requiring dissociation of Cas9 from the genome for long insertions to occur, which could possibly be inhibiting PE-based long insertions.

[1551] (iv) Installation of Additional RNA Motifs at the 5′ or 3′ Termini

[1552] PEgRNA designs could also be improved via the installation of additional motifs at either end of the terminus of the RNA. Several such motifs—such as the PAN ENE from KSHV and the ENE from MALAT1 were discussed earlier in part (i)^{184,185} as possible means to terminate expression of longer PEgRNAs from non-pol III promoters. These elements form RNA triple helices that engulf the polyA tail, resulting in their being retained within the nucleus^{184,187}. However, by forming complex structures at the 3′ terminus of the PEgRNA that occlude the terminal nucleotide, these structures would also likely help prevent exonuclease-mediated degradation of PEgRNAs. Other structural elements inserted at the 3′ terminus could also enhance RNA stability, albeit without enabling termination from non-pol III promoters. Such motifs could include hairpins or RNA quadruplexes that would occlude the 3′ terminus¹⁹⁷, or self-cleaving ribozymes such as HDV that would result in the formation of a 2′-3′-cyclic phosphate at the 3′ terminus and also potentially render the PEgRNA less likely to be degraded by exonucleases¹⁹⁸. Inducing the PEgRNA to cyclize via incomplete splicing—to form a ciRNA—could also increase PEgRNA stability and result in the PEgRNA being retained within the nucleus¹⁹⁴.

[1553] Additional RNA motifs could also improve RT processivity or enhance PEgRNA activity by enhancing RT binding to the DNA-RNA duplex. Addition of the native sequence bound by the RT in its cognate retroviral genome could enhance RT activity¹⁹⁹. This could include the native primer binding site (PBS), polypurine tract (PPT), or kissing loops involved in retroviral genome dimerization and initiation of transcription¹⁹⁹. Addition of dimerization motifs—such as kissing loops or a GNRA tetraloop/tetraloop receptor pair²⁰⁰—at the 5′ and 3′ termini of the PEgRNA could also result in effective circularization of the PEgRNA, improving stability. Additionally, it is envisioned that addition of these motifs could enable the physical separation of the PEgRNA spacer and primer, prevention occlusion of the spacer which would hinder PE activity. Short 5′ extensions to the PEgRNA that form a small toehold hairpin in the spacer region could also compete favorably against the annealing region of the PEgRNA binding the spacer. Finally, kissing loops could also be used to recruit other template RNAs to the genomic site and enable swapping of RT activity from one RNA to the other section iii).

PEgRNA-HDV fusion
(SEQ ID NO: 230)
GGCCCAGACTGAGCACGTGAGTTTTAGAGCTAGAAATAGCAAGTTAAAATA
AGGCTAGTCCGTTATCAACTTGAAAAAGTGGGACCGAGTCGGTCCTCTGCC
ATCAAAGCGTGCTCAGTCTGGGCCGGCATGGTCCCAGCCTCCTCGCTGGCG
CCGGCTGGGCAACATGCTTCGGCATGGCGAATGGGACTTTTTTT
PEgRNA-MMLV kissing loop
(SEQ ID NO: 231)
GGTGGGAGACGTCCCACCGGCCCAGACTGAGCACGTGAGTTTTAGAGCTAG
AAATAGCAAGTTAAAATAAGGCTAGTCCGTTATCAACTTGAAAAAGTGGGA
CCGAGTCGGTCCTCTGCCATCAAAGCTTCGACCGTGCTCAGTCTGGTGGGA
GACGTCCCACCTTTTTTT
PEgRNA-VS ribozyme kissing loop
(SEQ ID NO: 232)
GAGCAGCATGGCGTCGCTGCTCACGGCCCAGACTGAGCACGTGAGTTTTAG
AGCTAGAAATAGCAAGTTAAAATAAGGCTAGTCCGTTATCAACTTGAAAAA
GTGGGACCGAGTCGGTCCTCTGCCATCAAAGCTTCGACCGTGCTCAGTCTC
CATCAGTTGACACCCTGAGGTTTTTTT
PEgRNA-GNRA tetraloop/tetraloop receptor
(SEQ ID NO: 233)
GCAGACCTAAGTGGUGACATATGGTCTGGGCCCAGACTGAGCACGTGAGTT
TTAGAGCTAUACGTAGCAAGTTAAAATAAGGCTAGTCCGTTATCAACTTUA
CGAAGTGGGACCGAGTCGGTCCTCTGCCATCAAAGCTTCGACCGTGCTCAG
TCTGCATGCGATTAGAAATAATCGCATGTTTTTTT
PEgRNA template switching secondary RNA-HDV fusion
(SEQ ID NO: 234)
TCTGCCATCAAAGCTGCGACCGTGCTCAGTCTGGTGGGAGACGTCCCACCG
GCCGGCATGGTCCCAGCCTCCTCGCTGGCGCCGGCTGGGCAACATGCTTCG
GCATGGCGAATGGGACTTTTTTT

[1554] (v) Evolution of PEgRNAs

[1555] It is likely that the PEgRNA scaffold can be further improved via directed evolution, in an analogous fashion to how SpCas9 and base editors have been improved²⁰¹. Directed evolution could enhance PEgRNA recognition by Cas9 or evolved Cas9 variants. Additionally, it is likely that different PEgRNA scaffold sequences would be optimal at different genomic loci, either enhancing PE activity at the site in question, reducing off-target activities, or both. Finally, evolution of PEgRNA scaffolds to which other RNA motifs have been added would almost certainly improve the activity of the fused PEgRNA relative to the unevolved, fusion RNA. For instance, evolution of allosteric ribozymes composed of c-di-GMP-I aptamers and hammerhead ribozymes led to dramatically improved activity²⁰², suggesting that evolution would improve the activity of hammerhead-PEgRNA fusions as well. In addition, while Cas9 currently does not generally tolerate 5′ extension of the sgRNA, directed evolution will likely generate enabling mutations that mitigate this intolerance, allowing additional RNA motifs to be utilized.

[1556] As described herein, a number of these approaches have already been described for use with Cas9:sgRNA complexes, but no designs for improving PEgRNA activity have been reported. Other strategies for the installation of programmable mutations into the genome include base-editing, homology-directed recombination (HDR), precise microhomology-mediated end-joining (MMEJ), or transposase-mediated editing. However, all of these approaches have significant drawbacks when compared to PEs. Current base editors, while more efficient than existing PEs, can only install certain classes of genomic mutations and can result in additional, undesired nucleotide conversions at the site of interest. HDR is only feasible in a very small minority of cell types and results in comparably high rates of random insertion and deletion mutations (indels). Precise MMEJ can lead to predictable repair of double-strand breaks, but is largely limited to installation of deletions, is very site-dependent, and can also have comparably high rates of undesired indels. Transposase-mediated editing has to date only been shown to function in bacteria. As such improvements to PE represent possibly the best path forward for the therapeutic correction of a wide-swatch of genomic mutations.

### References Cited in Example 15

[1557] Each of the following references are cited in Example 15, each of which are incorporated herein by reference.
[1558] 1. Schechner, DM, Hacisuleyman E., Younger S T, Rinn J L. Nat Methods 664-70 (2015).
[1559] 2. Brown J A, et al. Nat Struct Mol Biol 633-40 (2014).
[1560] 3. Conrad N A and Steitz J A. EMBO J 1831-41 (2005).
[1561] 4. Bartlett J S, et al. Proc Natl Acad Sci USA 8852-7 (1996).
[1562] 5. Mitton-Fry R M, DeGregorio S J, Wang J, Steitz T A, Steitz J A. Science 1244-7 (2010).
[1563] 6. Forster A C, Symons R H. Cell. 1987.
[1564] 7. Weinberg Z, Kim P B, Chen T H, Li S, Harris K A, Lunse C E, Breaker R R. Nat. Chem. Biol. 2015.
[1565] 8. Feldstein P A, Buzayan J M, Bruening G. Gene 1989.
[1566] 9. Saville B J, Collins R A. Cell. 1990.
[1567] 10. Roth A, Weinberg Z, Chen A G, Kim P G, Ames T D, Breaker R R. Nat Chem Biol. 2013.
[1568] 11. Borchardt E K, et al. RNA 1921-30 (2015).
[1569] 12. Zhang Y, et al. Mol Cell 792-806 (2013).
[1570] 13. Dang Y, et al. Genome Biol 280 (2015).
[1571] 14. Schaefer M, Kapoor U, and Jantsch M F. Open Biol 170077 (2017).
[1572] 15. Nahar S, et al. Chem Comm 2377-80 (2018).
[1573] 16. Gao Y and Zhao Y. J Integr Plant Biol 343-9 (2014).
[1574] 17. Dubois N, Marquet R, Paillart J, Bernacchi S. Front Microbiol 527 (2018).
[1575] 18. Costa M and Michel F. EMBO J 1276-85 (1995).
[1576] 19. Hu J H, et al. Nature 57-63 (2018).
[1577] 20. Furukawa K, Gu H, Breaker R R. Methods Mol Biol 209-20 (2014).

### Example 16—Expanding the Targeting Scope of PE Using DNA Binding Proteins Other than SpCas9

[1578] Prime editing (PE) using Streptococcus pyogenes Cas9 (SpCas9) can efficiently install all single base substitutions, insertions, deletions, and combinations thereof at genomic loci where there is a suitably-placed NGG protospacer adjacent motif (PAM) that SpCas9 can efficiently bind. The methods described herein broaden the targeting capability of PE by expanding the accessible PAMs and, therefore, the targetable genomic loci accessible for efficient PE. Prime editors using RNA-guided DNA binding proteins other than SpCas9 enable an expanded targettable scope of genomic loci by allowing access to different PAMs. In addition, use of RNA-guided DNA binding proteins smaller than SpCas9 also allows for more efficient viral delivery. PE with Cas proteins or other RNA-guided DNA binding proteins beyond SpCas9 will allow for high efficiency therapeutic edits that were either inaccessible or inefficient using SpCas9-based PE.

[1579] This is expected to be used in situations where SpCas9-based PE is either inefficient due to non-ideal spacing of an edit to relative to an NGG PAM or the overall size of the SpCas9-based construct is prohibitive for cellular expression and/or delivery. Specific disease-relevant loci such as the Huntingtin gene, which has few and poorly located NGG PAMs for SpCas9 near the target region, can easily be targeted using different Cas proteins in the PE system such as SpCas9-VRQR which recognizes an NGA PAM. Smaller Cas proteins will be used to generate smaller PE constructs that can be packaged into AAV vectors more efficiently, enabling better delivery to target tissues. FIG. 61 shows the reduction to practice of prime editing using Staphylococcus aureus CRISPR-Cas as the RNA-guided DNA binding protein. NT is untreated control.

[1580] FIGS. 62A-62B provide a demonstration of the importance of the protospacer for efficient installation of a desired edit at a precise location with prime editing. This highlights the importance of alternate PAMs and protospacers as novel features of this technology. “n.d.” in FIG. 62A is “not detected.”

[1581] FIG. 63 shows the reduction to practice of PE using SpCas9(H840A)-VRQR and SpCas9(H840A)-VRER as the RNA-guided DNA binding protein in a prime editor system. The SpCas9(H840A)-VRQR napDNAbp is disclosed herein as SEQ ID NO: 87. The SpCas9(H840A)-VRER napDNAbp is disclosed herein as SEQ ID NO: 88. The SpCas9(H840A)-VRER-MMLV RT fusion protein is disclosed herein as SEQ ID NO: 516, wherein the MMLV RT comprises the D200N, L603W, T330P, T306K, and W313F substitutions relative to the wild type MMLV RT. The SpCas9(H840A)-VRQR-MMLV RT fusion protein is disclosed herein as SEQ ID NO: 515, wherein the MMLV RT comprises the D200N, L603W, T330P, T306K, and W313F substitutions relative to the wild type MMLV RT. Seven different loci in the human genome are targeted: 4 with the SpCas9(H840A)-VRQR-MMLV RT prime editor system and 3 with the SpCas9(H840A)-VRER-MMLV RT system. The amino acid sequences of the tested constructs are as follows:

| | |
|---|---|
| SACAS9-M-MLV | MKRTADGSEFESPKKKRKVGKRNYILGLDIGITSVGYGIIDYETR |
| RT PRIME EDITOR | DVIDAGVRLFKEANVENNEGRRSKRGARRLKRRRRHRIQRVKK |
| | LLFDYNLLTDHSELSGINPYEARVKGLSQKLSEEEFSAALLHLA |
| | KRRGVHNVNEVEEDTGNELSTKEQISRNSKALEEKYVAELQLE |
| | RLKKDGEVRGSINRFKTSDYVKEAKQLLKVQKAYHQLDQSFID |
| | TYIDLLETRRTYYEGPGEGSPFGWKDIKEWYEMLMGHCTYFPE |
| | ELRSVKYAYNADLYNALNDLNNLVITRDENEKLEYYEKFQIIEN |
| | VFKQKKKPTLKQIAKEILVNEEDIKGYRVTSTGKPEFTNLKVYH |
| | DIKDITARKEIIENAELLDQIAKILTIYQSSEDIQEELTNLNSELTQE |
| | EIEQISNLKGYTGTHNLSLKAINLILDELWHTNDNQIAIFNRLKL |
| | VPKKVDLSQQKEIPTTLVDDFILSPVVKRSFIQSIKVINAIIKKYG |
| | LPNDIIIELAREKNSKDAQKMINEMQKRNRQTNERIEEIIRTTGK |
| | ENAKYLIEKIKLHDMQEGKCLYSLEAIPLEDLLNNPFNYEVDHII |
| | PRSVSFDNSFNNKVLVKQEEASKKGNRTPFQYLSSSDSKISYETF |
| | KKHILNLAKGKGRISKTKKEYLLEERDINRFSVQKDFINRNLVD |
| | TRYATRGLMNLLRSYFRVNNLDVKVKSINGGFTSFLRRKWKFK |
| | KERNKGYKHHAEDALIIANADFIFKEWKKLDKAKKVMENQMF |
| | EEKQAESMPEIETEQEYKEIFITPHQIKHIKDFKDYKYSHRVDKK |
| | PNRELINDTLYSTRKDDKGNTLIVNNLNGLYDKDNDKLKKLIN |
| | KSPEKLLMYHHDPQTYQKLKLIMEQYGDEKNPLYKYYEETGN |
| | YLTKYSKKDNGPVIKKIKYYGNKLNAHLDITDDYPNSRNKVVK |
| | LSLKPYRFDVYLDNGVYKFVTVKNLDVIKKENYYEVNSKCYE |
| | EAKKLKKISNQAEFIASFYNNDLIKINGELYRVIGVNNDLLNRIE |
| | VNMIDITYREYLENMNDKRPPRIIKTIASKTQSIKKYSTDILGNL |
| | YEVKSKKHPQIIKKGSGGSSGGSSGSETPGTSESATPESSGGSSG |
| | GSSTLNIEDEYRLHETSKEPDVSLGSTWLSDFPQAWAETGGMGL |
| | AVRQAPLIIPLKATSTPVSIKQYPMSQEARLGIKPHIQRLLDQGIL |
| | VPCQSPWNTPLLPVKKPGTNDYRPVQDLREVNKRVEDIHPTVP |
| | NPYNLLSGLPPSHQWYTVLDLKDAFFCLRLHPTSQPLFAFEWR |
| | DPEMGISGQLTWTRLPQGFKNSPTLFDEALHRDLADFRIQHPDL |
| | ILLQYVDDLLLAATSELDCQQGTRALLQTLGNLGYRASAKKAQ |
| | ICQKQVKYLGYLLKEGQRWLTEARKETVMGQPTPKTPRQLREF |
| | LGTAGFCRLWIPGFAEMAAPLYPLTKTGTLFNWGPDQQKAYQEI |
| | KQALLTAPALGLPDLTKPFELFVDEKQGYAKGVLTQKLGPWRR |
| | PVAYLSKKLDPVAAGWPPCLRMVAAIAVLTKDAGKLTMGQPLVI |
| | LAPHAVEALVKQPPDRWLSNARMTHYQALLLDTDRVQFGPVV |
| | ALNPATLLPLPEEGLQHNCLDILAEAHGTRPDLTDQPLPDADHT |
| | WYTDGSSLLQEGQRKAGAAVTTETEVIWAKALPAGTSAQRAEL |
| | IALTQALKMAEGKKLNVYTDSRYAFATAHIHGEIYRRRGLLTSE |
| | GKEIKNKDEILALLKALFLPKRLSIIHCPGHQKGHSAEARGNRM |
| | ADQAARKAAITETPDTSTLLIENSSPSGGSKRTADGSEFEPKKKR |
| | KV (SEQ ID NO: 660) |
| SPCAS9(H840A)- | MKRTADGSEFESPKKKRKVDKKYSIGLDIGTNSVGWAVITDEY |
| VRQR-MALONEY | KVPSKKFKVLGNTDRHSIKKNLIGALLFDSGETAEATRLKRTAR |
| MURINE | RRYTRRKNRICYLQEIFSNEMAKVDDSFFHRLEESFLVEEDKKH |
| LEUKEMIA VIRUS | ERHPIFGNIVDEVAYHEKYPTIYHLRKKLVDSTDKADLRLIYLAL |
| REVERSE | AHMIKFRGHFLIEGDLNPDNSDVDKLFIQLVQTYNQLFEENPIN |
| TRANSCRIPTASE | ASGVDAKAILSARLSKSRRLENLIAQLPGEKKNGLFGNLIALSL |
| PRIME EDITOR | GLTPNFKSNFDLAEDAKLQLSKDTYDDDLDNLLAQIGDQYADL |
| | FLAAKNLSDAILLSDILRVNTEITKAPLSASMIKRYDEHHQDLTL |
| | LKALVRQQLPEKYKEIFFDQSKNGYAGYIDGGASQEEFYKFIKPI |
| | LEKMDGTEELLVKLNREDLLRKQRTFDNGSIPHQIHLGELHAIL |
| | RRQEDFYPFLKDNREKIEKILTFRIPYYVGPLARGNSRFAWMTR |
| | KSEETITPWNFEEVVDKGASAQSFIERMTNFDKNLPNEKVLPKH |
| | SLLYEYFTVYNELTKVKYVTEGMRKPAFLSGEQKKAIVDLLFKT |
| | NRKVTVKQLKEDYFKKIECFDSVEISGVEDRFNASLGTYHDLL |
| | KIIKDKDFLDNEENEDILEDIVLTLTLFEDREMIEERLKTYAHLFD |
| | DKVMKQLKRRRYTGWGRLSRKLINGIRDKQSGKTILDFLKSDG |
| | FANRNFMQLIHDDSLTFKEDIQKAQVSGQGDSLHEHIANLAGSP |
| | AIKKGILQTVKVVDELVKVMGRHKPENIVIEMARENQTTQKGQ |
| | KNSRERMKRIEEGIKELGSQILKEHPVENTQLQNEKLYLYYLQN |
| | GRDMYVDQELDINRLSDYDVDAIVPQSFLKDDSIDNKVLTRSD |
| | KNRGKSDNVPSEEVVKKMKNYWRQLLNAKLITQRKFDNLTKA |
| | ERGGLSELDKAGFIKRQLVETRQITKHVAQILDSRMNTKYDEND |
| | KLIREVKVITLKSKLVSDFRKDFQFYKVREINNYHHAHDAYLNA |
| | VVGTALIKKYPKLESEFVYGDYKVYDVRKMIAKSEQEIGKATA |
| | KYFFYSNIMNFFKTEITLANGEIRKRPLIETNGETGEIVWDKGRD |
| | FATVRKVLSMPQVNIVKKTEVQTGGFSKESILPKRNSDKLIARK |
| | KDWDPKKYGGFVSPTVAYSVLVVAKVEKGKSKKLKSVKELLGI |
| | TIMERSSFEKNPIDFLEAKGYKEVKKDLIIKLPKYSLFELENGRK |
| | RMLASARELQKGNELALPSKYVNFLYLASHYEKLKGSPEDNEQ |
| | KQLFVEQHKHYLDEIIEQISEFSKRVILADANLDKVLSAYNKHR |
| | DKPIREQAENIIHLFTLTNLGAPAAFKYFDTTIDRKQYRSTKEVL |
| | DATLIHQSITGLYETRIDLSQLGGDSGGSSGGSSGSETPGTSESAT |
| | PESSGGSSGGSSTLNIEDEYRLHETSKEPDVSLGSTWLSDFPQA |
| | WAETGGMGLAVRQAPLIIPLKATSTPVSIKQYPMSQEARLGIKP |
| | HIQRLLDQGILVPCQSPWNTPLLPVKKPGTNDYRPVQDLREVN |
| | KRVEDIHPTVPNPYNLLSGLPPSHQWYTVLDLKDAFFCLRLHPT |
| | SQPLFAFEWRDPEMGISGQLTWTRLPQGFKNSPTLFNEALHRDL |
| | ADFRIQHPDLILLQYVDDLLLAATSELDCQQGTRALLQTLGNLG |
| | YRASAKKAQICQKQVKYLGYLLKEGQRWLTEARKETVMGQPT |
| | PKTPRQLREFLGKAGFCRLFIPGFAEMAAPLYPLTKPGTLFNWG |
| | PDQQKAYQEIKQALLTAPALGLPDLTKPFELFVDEKQGYAKGVL |
| | TQKLGPWRRPVAYLSKKLDPVAAGWPPCLRMVAAIAVLTKDAG |
| | KLTMGQPLVILAPHAVEALVKQPPDRWLSNARMTHYQALLLDT |
| | DRVQFGPVVALNPATLLPLPEEGLQHNCLDILAEAHGTRPDLTD |
| | QPLPDADHTWYTDGSSLLQEGQRKAGAAVTTETEVIWAKALPA |
| | GTSAQRAELIALTQALKMAEGKKLNVYTDSRYAFATAHIHGEIY |
| | RRRGWLTSEGKEIKNKDEILALLKALFLPKRLSIIHCPGHQKGHS |
| | AEARGNRMADQAARKAAITETPDTSTLLIENSSPSGGSKRTADG |
| | SEFEPKKKRKV (SEQ ID NO: 661) |
| SPCAS9(H840A)- | MKRTADGSEFESPKKKRKVDKKYSIGLDIGTNSVGWAVITDEY |
| VRER-MALONEY | KVPSKKFKVLGNTDRHSIKKNLIGALLFDSGETAEATRLKRTAR |
| MURINE | RRYTRRKNRICYLQEIFSNEMAKVDDSFFHRLEESFLVEEDKKH |
| LEUKEMIA VIRUS | ERHPIFGNIVDEVAYHEKYPTIYHLRKKLVDSTDKADLRLIYLAL |
| REVERSE | AHMIKFRGHFLIEGDLNPDNSDVDKLFIQLVQTYNQLFEENPIN |
| TRANSCRIPTASE | ASGVDAKAILSARLSKSRRLENLIAQLPGEKKNGLFGNLIALSL |
| PRIME EDITOR | GLTPNFKSNFDLAEDAKLQLSKDTYDDDLDNLLAQIGDQYADL |
| | FLAAKNLSDAILLSDILRVNTEITKAPLSASMIKRYDEHHQDLTL |
| | LKALVRQQLPEKYKEIFFDQSKNGYAGYIDGGASQEEFYKFIKPI |
| | LEKMDGTEELLVKLNREDLLRKQRTFDNGSIPHQIHLGELHAIL |
| | RRQEDFYPFLKDNREKIEKILTFRIPYYVGPLARGNSRFAWMTR |
| | KSEETITPWNFEEVVDKGASAQSFIERMTNFDKNLPNEKVLPKH |
| | SLLYEYFTVYNELTKVKYVTEGMRKPAFLSGEQKKAIVDLLFKT |
| | NRKVTVKQLKEDYFKKIECFDSVEISGVEDRFNASLGTYHDLL |
| | KIIKDKDFLDNEENEDILEDIVLTLTLFEDREMIEERLKTYAHLFD |
| | DKVMKQLKRRRYTGWGRLSRKLINGIRDKQSGKTILDFLKSDG |
| | FANRNFMQLIHDDSLTFKEDIQKAQVSGQGDSLHEHIANLAGSP |
| | AIKKGILQTVKVVDELVKVMGRHKPENIVIEMARENQTTQKGQ |
| | KNSRERMKRIEEGIKELGSQILKEHPVENTQLQNEKLYLYYLQN |
| | GRDMYVDQELDINRLSDYDVDAIVPQSFLKDDSIDNKVLTRSD |
| | KNRGKSDNVPSEEVVKKMKNYWRQLLNAKLITQRKFDNLTKA |
| | ERGGLSELDKAGFIKRQLVETRQITKHVAQILDSRMNTKYDEND |
| | KLIREVKVITLKSKLVSDFRKDFQFYKVREINNYHHAHDAYLNA |
| | VVGTALIKKYPKLESEFVYGDYKVYDVRKMIAKSEQEIGKATA |
| | KYFFYSNIMNFFKTEITLANGEIRKRPLIETNGETGEIVWDKGRD |
| | FATVRKVLSMPQVNIVKKTEVQTGGFSKESILPKRNSDKLIARK |
| | KDWDPKKYGGFVSPTVAYSVLVVAKVEKGKSKKLKSVKELLGI |
| | TIMERSSFEKNPIDFLEAKGYKEVKKDLIIKLPKYSLFELENGRK |
| | RMLASARELQKGNELALPSKYVNFLYLASHYEKLKGSPEDNEQ |
| | KQLFVEQHKHYLDEIIEQISEFSKRVILADANLDKVLSAYNKHR |
| | DKPIREQAENIIHLFTLTNLGAPAAFKYFDTTIDRKEYRSTKEVL |
| | DATLIHQSITGLYETRIDLSQLGGDSGGSSGGSSGSETPGTSESAT |
| | PESSGGSSGGSSTLNIEDEYRLHETSKEPDVSLGSTWLSDFPQA |
| | WAETGGMGLAVRQAPLIIPLKATSTPVSIKQYPMSQEARLGIKP |
| | HIQRLLDQGILVPCQSPWNTPLLPVKKPGTNDYRPVQDLREVN |
| | KRVEDIHPTVPNPYNLLSGLPPSHQWYTVLDLKDAFFCLRLHPT |
| | SQPLFAFEWRDPEMGISGQLTWTRLPQGFKNSPTLFNEALHRDL |
| | ADFRIQHPDLILLQYVDDLLLAATSELDCQQGTRALLQTLGNLG |
| | YRASAKKAQICQKQVKYLGYLLKEGQRWLTEARKETVMGQPT |
| | PKTPRQLREFLGKAGFCRLFIPGFAEMAAPLYPLTKPGTLFNWG |
| | PDQQKAYQEIKQALLTAPALGLPDLTKPFELFVDEKQGYAKGVL |
| | TQKLGPWRRPVAYLSKKLDPVAAGWPPCLRMVAAIAVLTKDAG |
| | KLTMGQPLVILAPHAVEALVKQPPDRWLSNARMTHYQALLLDT |
| | DRVQFGPVVALNPATLLPLPEEGLQHNCLDILAEAHGTRPDLTD |
| | QPLPDADHTWYTDGSSLLQEGQRKAGAAVTTETEVIWAKALPA |
| | GTSAQRAELIALTQALKMAEGKKLNVYTDSRYAFATAHIHGEIY |
| | RRRGWLTSEGKEIKNKDEILALLKALFLPKRLSIIHCPGHQKGHS |
| | AEARGNRMADQAARKAAITETPDTSTLLIENSSPSGGSKRTADG |
| | SEFEPKKKRKV (SEQ ID NO: 662) |

[1582] As shown in FIG. 63, the SpCas9(H840A)-VRQR-MMLV RT was operational at PAM sites that included “AGAG” and “GGAG”, with some editing activity at “GGAT” and “AGAT” PAM sequences. The SpCas9(H840A)-VRER-MMLV RT was operational at PAM sites that included “AGCG” and “GGCG”, with some editing activity at “TGCG.”

[1583] The data demonstrates that prime editing may be conducted using napDNAbps which bear different PAM specificities, such as those Cas9 variant described herein.

### Example 17—Introduction of Recombinase Target Sites with PE

[1584] This Example describes a method to address genetic disease or generate tailor-made animal or plant models by using prime editing (PE) to introduce recombinase targets sites (SSR target sites) in mammalian and other genomes with high specificity and efficiency.

[1585] This Example describes use of PE to introduce recombinase recognition sequences at high-value loci in human or other genomes, which, after exposure to site-specific recombinase(s), will direct precise and efficient genomic modifications (FIG. 64). In various embodiments show in FIG. 64, PE may be used to (b) insert a single SSR target for use as a site for genomic integration of a DNA donor template. (c) shows how a tandem insertion of SSR target sites can be used to delete a portion of the genome. (d) shows how a tandem insertion of SSR target sites can be used to invert a portion of the genome. (e) shows how the insertion of two SSR target sites at two distal chromosomal regions can result in chromosomal translocation. (f) shows how the insertion of two different SSR target sites in the genome can be used to exchange a cassette from a DNA donor template. Each of the types of genome modifications are envisioned by using PE to insert SSR targets, but this list also is not meant to be limiting.

[1586] Many large-scale genomic changes, such as gene insertions, deletions, inversions, or chromosomal translocations, are implicated in genetic disease¹⁻⁷. In addition, custom and targeted manipulation of eukaryotic genomes is important for research into human disease, as well as generation of transgenic plants^{8,9} or other biotechnological products. For example, microdeletions of chromosomes can lead to disease, and replacement of these deletions by insertions of critical DNA elements could lead to a permanent amelioration of disease. In addition, diseases resulting from inversions, gene copy number changes, or chromosomal translocations could be addressed by restoring the previous gene structure in affected cells. Alternatively, in plants or other high value eukaryotic organisms used in industry, introduction of recombinant DNA or targeted genomic rearrangements could lead to improved products, for example crops which require fewer resources or are resistant to pathogens. Current technologies for effecting large-scale genomic changes rely on random or stochastic processes, for example the use of transposons or retroviruses, while other desired genomic modifications have only been achieved by homologous recombination strategies.

[1587] One appealing class of proteins for accomplishing targeted and efficient genomic modification is site-specific recombinases (SSRs). SSRs have a long history of being used as a tool for genomic modification¹⁰⁻¹³. SSRs are considered promising tools for gene therapy because they catalyze the precise cleavage, strand exchange, and rejoining of DNA fragments at defined recombination targets¹⁴ without relying on the endogenous repair of double-strand breaks which can induce indels, translocations, other DNA rearrangements, or p53 activation¹⁵⁻¹⁸ The reactions catalyzed by SSRs can result in the direct replacement, insertion, or deletion of target DNA fragments with efficiencies exceeding those of homology-directed repair¹⁴⁻¹⁹.

[1588] Although SSRs offer many advantages, they are not widely used because they have a strong innate preference for their cognate target sequence. The recognition sequences of SSRs are typically ≥20 base pairs and thus unlikely to occur in the genomes of humans or model organisms. Further, the native substrate preferences of SSRs are not easily altered, even with extensive laboratory engineering or evolution²⁰. This limitation is overcome by using PE to directly introduce recombinase targets into the genome, or to modify endogenous genomic sequences which natively resemble recombinase targets. Subsequent exposure of the cell to recombinase protein will permit precise and efficient genomic modification directed by the location and orientation of the recombinase target(s) (FIG. 64).

[1589] PE-mediated introduction of recombinase targets could be particularly useful for the treatment of genetic diseases which are caused by large-scale genomic defects, such as gene loss, inversion, or duplication, or chromosomal translocation¹⁻⁷ (Table 6). For example, Williams-Beuren syndrome is a developmental disorder caused by a deletion of 24 in chromosome 721. No technology exists currently for the efficient and targeted insertion of multiple entire genes in living cells (the potential of PE to do such a full-length gene insertion is currently being explored but has not yet been established); however, recombinase-mediated integration at a target inserted by PE offers one approach towards a permanent cure for this and other diseases. In addition, targeted introduction of recombinase recognition sequences could be highly enabling for applications including generation of transgenic plants, animal research models, bioproduction cell lines, or other custom eukaryotic cell lines. For example, recombinase-mediated genomic rearrangement in transgenic plants at PE-specific targets could overcome one of the bottlenecks to generating agricultural crops with improved properties⁸⁻⁹.

[1590] A number of SSR family members have been characterized and their target sequences described, including natural and engineered tyrosine recombinases (TABLE 7), large serine integrases (TABLE 8), serine resolvases (TABLE 9), and tyrosine integrases (TABLE 10). Modified target sequences that demonstrate enhanced rates of genomic integration have also been described for several SSRs²²⁻³⁰. In addition to natural recombinases, programmable recombinases with distinct specificities have been developed³¹⁻⁴⁰. Using PE, one or more of these recognition sequences could be introduced into the genomic at a specified location, such as a safe harbor locus⁴¹⁻⁴³, depending on the desired application.

[1591] For example, introduction of a single recombinase target in the genome would result in integrative recombination with a DNA donor template (FIG. 64B). Serine integrases, which operate robustly in human cells, may be especially well-suited for gene integration Additionally, introduction of two recombinase targets could result in deletion of the intervening sequence, inversion of the intervening sequence, chromosomal translocation, or cassette exchange, depending on the identity and orientation of the targets (FIGS. 64C-64F). By choosing endogenous sequences that already closely resemble recombinase targets, the scope of editing required to introduce the complete recombinase target would be reduced.

[1592] Finally, several recombinases have been demonstrated to integrate into human or eukaryotic genomes at natively occurring pseudosites⁴⁶⁻⁶⁴. PE editing could be used to modify these loci to enhance rates of integration at these natural pseudosites, or alternatively, to eliminate pseudosites that may serve as unwanted off-target sequences.

[1593] This report describes a general methodology for introducing recombinase target sequences in eukaryotic genomes using PE, the applications of which are nearly limitless. The genome editing reactions are intended for use with “prime editor,” a chimeric fusion of a CRISPR/Cas9 protein and a reverse-transcriptase domain, which utilizes a custom prime editing guide RNA (PEgRNA). By extension, Cas9 tools and homology-directed repair (HDR) pathways may also be exploited to introduce recombinase targets through DNA templates by lowering the rates of indels using several techniques⁶⁵⁻⁶⁷ A proof-of-concept experiment in human cell culture is shown in FIG. 65.

TABLE 6
Examples of genetic diseases linked to large-scale genomic
modifications.

| Disease | Source | Cause |
|---|---|---|
| Trisomy 17p | 68 | Gene duplication |
| Charcot-Marie-Tooth | 69 | Gene duplication |
| Smith-Magenis syndrome | 70 | Gene deletion |
| Williams-Beuren | 21 | Gene deletion |
| De la Chapelle syndrome | 71 | Chromosomal translocation |
| Down syndrome (some | 72 | Chromosomal translocation |
| Hemophilia A | 73 | Gene inversion |
| Hunter syndrome | 74 | Gene inversion |

TABLE 7
Tyrosine recombinases and SSR target sequences.

| cRecombinase | Source | Target | Name |
|---|---|---|---|
| Cre | 75 | ATAACTTCGTATAGCATACATTATACG | loxP |
| | | AAGTTAT (SEQ ID NO: 517) | |
| Dre | 76 | TAACTTTAAATAATGCCAATTATTTAA | rox |
| | | AGTTA (SEQ ID NO: 518) | |
| VCre | 77 | TCAATTTCTGAGAACTGTCATTCTCGG | loxV |
| | | AAATTGA (SEQ ID NO: 519) | |
| SCre | 77 | CTCGTGTCCGATAACTGTAATTATCGG | loxS |
| | | ACATGAT (SEQ ID NO: 520) | |
| Flp | 78 | GAAGTTCCTATTCTCTAGAAAGTATAG | FRT |
| | | GAACTTC (SEQ ID NO: 521) | |
| B2 | 79 | GAGTTTCATTAAGGAATAACTAATTCC | loxB |
| | | CTAATGAAACTC (SEQ ID NO: 522) | |
| B3 | 79 | GGTTGCTTAAGAATAAGTAATTCTTAA | loxB3 |
| | | GCAACC (SEQ ID NO: 523) | |
| Kw | 80 | ACGAAAAATGGTAAGGAATAGACCAT | |
| | | TCCTTACCATTTTTGGT (SEQ ID NO: | |
| | | 524) | |
| R | 81 | TTGATGAAAGAATAACGTATTCTTTCA | RS |
| | | TCAA (SEQ ID NO: 525) | |
| TD1-40 | 82 | GTGCGTCAAATAATAACGTATTATTTG | TDRS |
| | | ACACTT (SEQ ID NO: 526) | |
| Vika | 83 | AATAGGTCTGAGAACGCCCATTCTCAG | vox |
| | | ACGTATT (SEQ ID NO: 527) | |
| Nigri | 84 | TGAATGTCCTATAATTACACTTATAGG | nox |
| | | ACATTCA (SEQ ID NO: 528) | |
| Panto | 84 | GAAACTTTAAATAATAAGTCTTATTTA | pox |
| | | AAGTTTC (SEQ ID NO: 529) | |
| Kd | 79 | AAACGATATCAGACATTTGTCTGATA | loxK |
| | | ATGCTTCATTATCAGACAAATGTCTG | |
| | | ATATCGTTT (SEQ ID NO: 530) | |
| Fre | 85 | ATATATACGTATATAGACATATATACG | loxH |
| | | TATATAT (SEQ ID NO: 531) | |
| CreALSHG | 86 | ATAACTCTATATAATGTATGCTATATA | loxM7 |
| | | GAGTTAT (SEQ ID NO: 532) | |
| Tre | 87 | ACAACATCCTATTACACCCTATATGCC | loxLTR |
| | | AACATGG (SEQ ID NO: 533) | |
| Brec1 | 12 | AACCCACTGCTTAAGCCTCAATAAAGC | loxBTR |
| | | TTGCCTT (SEQ ID NO: 534) | |
| Cre-R3M3 | 88 | GATACAACGTATATACCTTTCTATACG | loxK2 |
| | | TTGTTTA (SEQ ID NO: 535) | |

TABLE 8
Large serine integrases and SSR target sequences.

| Integrase | Source | Left Target | Right Target |
|---|---|---|---|
| Bxb1 | 89 | GGTTTGTCTGGTCAACCACC | GGCTTGTCGACGACGGCGG |
| | | GCGGTCTCAGTGGTGTACGG | TCTCCGTCGTCAGGATCAT |
| | | TACAAACC (SEQ ID NO: 536) | (SEQ ID NO: 537) |
| phiC31 | 90 | GTGCCCCAACTGGGGTAACC | TGCGGGTGCCAGGGCGTGC |
| | | TTTGAGTTCTCTCAGTTGGG | CCTTGGGCTCCCCGGGCGCG |
| | | GG (SEQ ID NO: 538) | TACTCC (SEQ ID NO: 539) |
| R4 | 91 | TGTTCCCCAAAGCGATACCA | GCATGTTCCCCAAAGCGATA |
| | | CTTGAAGCAGTGGTACTGCT | CCACTTGAAGCAGTGGTACT |
| | | TGTGGGTACA (SEQ ID NO: | GCTTGTGGGTACACTCTGCG |
| | | 540) | GGTG (SEQ ID NO: 541) |
| phiBT1 | 92 | GGTGCTGGGTTGTTGTCTCT | CAGGTTTTTGACGAAAGTGA |
| | | GGACAGTGATCCATGGGAA | TCCAGATGATCCAG (SEQ ID |
| | | ACTACTCAGCACC (SEQ ID | NO: 543) |
| | | NO: 542) | |
| MJ1 | 93 | ATTTTAGGTATATGATTTTGT | CAAAGGATCACTGAATCAA |
| (phiFC1) | | TTATTAGTGTAAATAACACT | AAGTATTGCTCATCCACGCG |
| | | ATGTACCTAAAAT (SEQ ID | AAA (SEQ ID NO: 545) |
| | | NO: 544) | |
| MR11 | 94 | TTTGTGCGGAACTACGAACA | CGAAAATGTATGGAGGCAC |
| | | GTTCATTAATACGAAGTGTA | TTGTATCAATATAGGATGTA |
| | | CAAACTTCCATACAA (SEQ | TACCTTCGAAGACACTT |
| | | ID NO: 546) | (SEQ ID NO: 547) |
| TP901-1 | 95 | GAGTTTTTATTTCGTTTATTT | ATGCCAACACAATTAACATC |
| | | CAATTAAGGTAACTAAAAA | TCAATCAAGGTAAATGCTTT |
| | | ACTCCTTTTAAGG (SEQ ID | TTGCTTTTTTTGC (SEQ ID |
| | | NO: 548) | NO: 549) |
| A118 | 96 | TTCCTCGTTTTCTCTCGTTGG | TTTCGGATCAAGCTATGAAG |
| | | AAGAAGAAGAAACGAGAAA | GACGCAAAGAGGGAACTAA |
| | | (SEQ ID NO: 550) | A (SEQ ID NO: 551) |
| U153 | 97 | TTCCTCGTTTTCTCTCGTTGG | TTTCGGATCAAGCTATGAAG |
| | | ACGGAAACGAATCGAGAAA | GACGCAAAGAGGGAACTAA |
| | | (SEQ ID NO: 552) | A (SEQ ID NO: 553) |
| phiRV1 | 98 | GTAGTGTATCTCACAGGTCC | GAAGGTGTTGGTGCGGGGT |
| | | ACGGTTGGCCGTGGACTGCT | TGGCCGTGGTCGAGGTGGG |
| | | GAAGAACATTCC (SEQ ID | GT (SEQ ID NO: 555) |
| | | NO: 554) | |
| phi370.1 | 99 | AAAAAAATACAGCGTTTTTC | TTGTAAAGGAGACTGATAA |
| | | ATGTACAACTATACTAGTTG | TGGCATGTACAACTATACTC |
| | | TAGTGCCTAAAA (SEQ ID | GTCGGTAAAAAGGCA (SEQ |
| | | NO: 556) | ID NO: 557) |
| TG1 | 100 | TCCAGCCCAACAGTGTTAGT | GATCAGCTCCGCGGGCAAG |
| | | CTTTGCTCTTACCCAGTTGG | ACCTTTCTCCTTCACGGGGT |
| | | GCGGGA (SEQ ID NO: 558) | GGAAGGTC (SEQ ID NO: 559) |
| WB | 101 | CTAGTTTTAAAGTTGGTTAT | CGGAAGGTAGCGTCAACGA |
| | | TAGTTACTGTGATATTTATC | TAGGTGTAACTGTCGTGTTT |
| | | ACGGTACCCAATAACCAATG | GTAACGGTACTTCCAACAGC |
| | | AAT (SEQ ID NO: 560) | TGGCGCCGCCAC (SEQ ID |
| | | | NO: 561) |
| BL3 | 102 | CAATGAAAAACTAGGCATGT | TTTCCACAGACAACTCACGT |
| | | AGAAGTTGTTTGT (SEQ ID | GGAGGTAGTCAC (SEQ ID |
| | | NO: 562) | NO: 563) |
| SprA | 103 | TGTAGTAAGTATCTTAATAT | CACCCATTGTGTTCACAGGA |
| | | ACAGCTTTATCTGTTTTTTAA | GATACAGCTTTATCTGTACT |
| | | GATACTTACTACTTT (SEQ ID | GATATTAATGACATGCTG |
| | | NO: 564) | (SEQ ID NO: 565) |
| phiJoe | 104 | AGTTGTGGCCATGTGTCCAT | ATCTGGATGTGGGTGTCCAT |
| | | CTGGGGGCAGATGGAGACG | CTGCGGGCAGACGCCGCAG |
| | | GGGTCACA (SEQ ID NO: 566) | TCGAAGCACGG (SEQ ID NO: |
| | | | 567) |
| phiK38 | 105 | CCCTAATACGCAAGTCGATA | GAGCGCCGGATCAGGGAGT |
| | | ACTCTCCTGGGAGCGTTGAC | GGACGGCCTGGGAGCGCTA |
| | | AACTTGCGCACCCTGATCTG | CACGCTGTGGCTGCGGTCGG |
| | | (SEQ ID NO: 569) | TGC (SEQ ID NO: 570) |
| Int2 | 105 | GCTCATGTATGTGTCTACGC | GGACGGCGCAGAAGGGGAG |
| | | GAGATTCTCGCCCGAGAACT | TAGCTCTTCGCCGGACCGTC |
| | | TCTGCAAGGCACTGCTCTTG | GACATACTGCTCAGCTCGTC |
| | | GCT (SEQ ID NO: 571) | (SEQ ID NO: 572) |
| Int3 | 105 | ATGGATAAAAAAATACAGC | GTTTGTAAAGGAGACTGAT |
| | | GTTTTTCATGTACAACTATA | AATGGCATGTACAACTATAC |
| | | CTAGTTGTAGTGCCTAAATA | TCGTCGGTAAAAAGGCATCT |
| | | ATGCTT (SEQ ID NO: 573) | TAT (SEQ ID NO: 574) |
| Int4 | 105 | AAAAATTACAAAGTTTTCAA | TTCCAAAGAGCGCCCAACG |
| | | CCCTTGATTTGAATTAGCGG | CGACCTGAAATTTGAATAA |
| | | TCAAATAATTTGTAATTCGT | GACTGCTGCTTGTGTAAAGG |
| | | TT (SEQ ID NO: 575) | CGATGATT (SEQ ID NO: 576) |
| Int7 | 105 | GTGTTATAAACCTGTGTGAG | AGACGAGAAACGTTCCGTC |
| | | AGTTAAGTTTACATGCCTAA | CGTCTGGGTCAGTTGGGCAA |
| | | CCTTAACTTTTACGCAGGTT | AGTTGATGACCGGGTCGTCC |
| | | CAGCTT(SEQ ID NO: 577) | GTT (SEQ ID NO: 578) |
| Int8 | 105 | TTAATAAACTATGGAAGTAT | CAATCATCAGATAACTATGG |
| | | GTACAGTCTTGCAATGTTGA | CGGCACGTGCATTAACCAC |
| | | GTGAACAAACTTCCATAATA | GGTTGTATCCCGTCTAAAGT |
| | | AAAT (SEQ ID NO: 579) | ACTCGT (SEQ ID NO: 580) |
| Int9 | 105 | GTGGTTGTTTTTGTTGGAAG | TTTATATTGCGAAAAATAAT |
| | | TGTGTATCAGGTATCTGCAT | TGGCGAACGAGGTAACTGG |
| | | AGTTATTCCGAACTTCCAAT | ATACCTCATCCGCCAATTAA |
| | | TA (SEQ ID NO: 581) | AATTTG (SEQ ID NO: 582) |
| Int 10 | 105 | GGAAAATATAAATAATTTTA | AGCACGCTGATAATCAGCA |
| | | GTAACCTACATCTCAATCAA | AGACCACCAACATTTCCACC |
| | | GGATAGTAAAACTCTCACTC | AATGTAAAAGCTTTAACCTT |
| | | TT (SEQ ID NO: 583) | AGC (SEQ ID NO: 584) |
| Int11 | 105 | GTTTATATGTTTACTAATAA | ATGGATTTTGCAGATTCCCA |
| | | GACGCTCTCAACCCATAAAG | GATGCCCCTACAGAAAGAG |
| | | TCTTATTAGTAAACATATTT | GTACAAAACATTTATTGGAA |
| | | CAACT (SEQ ID NO: 585) | TTAATT (SEQ ID NO: 586) |
| Int12 | 105 | TTTTTGTATGTTAGTTGTGTC | GTTCGTGGTAACTATGGGTG |
| | | ACTGGGTAGACCTAAATAGT | GTACAGGTGCCACATTAGTT |
| | | GACACAACTGCTATTAAAAT | GTACCATTTATGTTTATGTG |
| | | TTAA (SEQ ID NO: 587) | GTTAAC (SEQ ID NO: 588) |
| Int13 | 105 | CAATAACGGTTGTATTTGTA | GCATACATTGTTGTTGTTTT |
| | | GAACTTGACCAGTTGTTTTA | TCCAGATCCAGTTGGTCCTG |
| | | GTAACATAAATACAACTCCG | TAAATATAAGCAATCCATGT |
| | | AATA (SEQ ID NO: 589) | GAGT (SEQ ID NO: 590) |
| LI | 106 | GTTTAGTATCTCGTTATCTCT | TAACTTTTTCGGATCGAGTT |
| | | CGTTGGAGGGAGAAGAAAC | ATGATGGACGTAAAGAGGG |
| | | GGGATACCAAAA (SEQ ID | AACAAAGCATCTA (SEQ ID |
| | | NO: 591) | NO: 592) |
| Peaches | 107 | TAGTTTCCAATGTTACAGGA | CGGTCTCCATCGGGATCTGC |
| | | ACTGCTGGCAGAATCCAACA | TGATCGAGCAGCATGCCGA |
| | | CATTGGAAGTCG (SEQ ID | CCA (SEQ ID NO: 594) |
| | | NO: 593) | |
| Bxz2 | 107 | TAACCGCAAGTGTACATCCC | CGGTCTCCATCGGGATCTGC |
| | | TCGGCTGGCCGAGACAAGTA | TGATCGAGCAGCATGCCGA |
| | | CAGTTGCGACAG (SEQ ID | CCA (SEQ ID NO: 596) |
| | | NO: 595) | |
| SV1 | 108 | ATGTGGTCCTTTAGATCCAC | CATCAGGGCGGTCAGGCCG |
| | | TGACGTGGGTCAGTGTCTCT | TAGATGTGGAAGAAACGGC |
| | | AAAGGACTCGCG (SEQ ID | AGCACGGCGAGGACG (SEQ |
| | | NO: 597) | ID NO: 598) |

TABLE 9
Serine resolvases and SSR target sequences.

| Resolvase | Source | Left Target | Right Target |
|---|---|---|---|
| Gin | 109 | CGTTTCCTGTAAACCGAGGT | CGTTTCCTGTAAACCGAGGT |
| | | TTTGGATAAACA (SEQ ID | TTTGGATAATGG (SEQ ID |
| | | NO: 599) | NO: 600) |
| Cin | 110 | GAGTTCTCTTAAACCAAGGT | GAGTTCTCTTAAACCAAGGT |
| | | TTAGGATTGAAA (SEQ ID | ATTGGATAACAG (SEQ ID |
| | | NO: 601) | NO: 602) |
| Hin | 111 | TGGTTCTTGAAAACCAAGGT | AAATTTTCCTTTTTGGAAGG |
| | | TTTTGATAAAGC (SEQ ID NO: | TTTTTGATAACCA (SEQ ID |
| | | 603) | NO: 604) |
| Min | 112 | GCCTTCCCCTAAACCAACGT | GCCTTCCCCCAAACCAAGGT |
| | | TTTTATGCCGCC (SEQ ID NO: | AATCAAGAACGC (SEQ ID |
| | | 605) | NO: 606) |
| Sin | 113 | TTGTGAAATTTGGGTACACC | CGTATGATTAGGGTGTATAT |
| | | CTAATCATACAA (SEQ ID | TAATTT (SEQ ID NO: 608) |
| | | NO: 607) | |

TABLE 10
Tyrosine integrases and target sequences.

| Integrase | Source | attP | attB |
|---|---|---|---|
| HK022 | 114 | CAAATGATTTTATTTTGACTAATAA | GCACTTTAGGTGA |
| | | TGACCTACTTACATTAATTTACTGAT | AAAAGGTT (SEQ |
| | | AATTAAAGAGATTTTAAATATACAA | ID NO: 610) |
| | | CTTATTCACCTAAAGGATGACAAAA | |
| | | (SEQ ID NO: 609) | |
| P22 | 115 | CTAAGTGGTTTGGGACAAAAATGGG | GCAGCGCATTCGT |
| | | ACATACAAATCTTTGCATCGGTTTG | AATGCGAAGGTCG |
| | | CAAGGCTTTGCATGTCTTTCGAAGA | T (SEQ ID NO: 613) |
| | | TGGGACGTGTGAGCGCAGGTATGAC | |
| | | GTGGTATGTGTTGACTTAAAAGGTA | |
| | | GTTCTTATAATTCGTAATGCGAAGG | |
| | | TCGTAGGTTCGACTCCTATTATCGG | |
| | | CACCAGTTAAATCAAATACTTACGT | |
| | | ATTATTCGTGCCTTCCTTATTTTTAC | |
| | | TGTGGGACATATTTGGGACAGAAGT | |
| | | ACCAAAAA (SEQ ID NO: 612) | |
| L5 | 116 | GCGATCCCCATCCGCGACGTGCCAA | GAGCGGGCGACG |
| | | CTAGGTCTCCTCTCGTCGTGAACAA | GGAATCGAACCCG |
| | | GGCTACCGGGTTGCAACTCCTGTGC | CGTAGCTAGTTTG |
| | | AACTCTCAGGCTTCAACGCGCTTCT | GAAGA (SEQ ID |
| | | ACGACCTGCAATTTCTTTCCACTTA | NO: 615) |
| | | GAGGATGCAGCCGAGAGGGGTAAA | |
| | | AACCTATCTTGACCGGCCCATATGT | |
| | | GGTCGGCAGACACCCATTCTTCCAA | |
| | | ACTAGCTACGCGGGTTCGATTCCCG | |
| | | TCGCCCGCTCCGCTGGTCAGAGGGT | |
| | | GTTTTCGCCCTCTGGCCATTTTTCTT | |
| | | TCCAGGGGTCTGCAACTCTTGTGCG | |
| | | ACTCTTCTGACCTGGGCATACGCGG | |
| | | TTGCAACGCATCCCTGATCTGGCTA | |
| | | CTTTCGATGCTGACAAACGAATAGA | |
| | | GCCCCCCGCCTGCGCGAACAGACG | |
| | | AGGGGCATTCACA (SEQ ID NO: 614) | |

### References Cited in Example 17

[1594] Each of the following references are cited in Example 17, each of which are incorporated herein by reference.
[1595] 1. Feuk, L. Inversion variants in the human genome: role in disease and genome architecture. Genome Med 2,11 (2010).
[1596] 2. Zhang, F., Gu, W., Hurles, M. E. & Lupski, J. R. Copy number variation in human health, disease, and evolution. Annu Rev Genomics Hum Genet 10, 451-481 (2009).
[1597] 3. Shaw, C. J. & Lupski, J. R. Implications of human genome architecture for rearrangement-based disorders: the genomic basis of disease. Hum Mol Genet 13 Spec No 1, R57-64 (2004).
[1598] 4. Carvalho, C. M., Zhang, F. & Lupski, J. R. Evolution in health and medicine Sackler colloquium: Genomic disorders: a window into human gene and genome evolution. Proc Natl Acad Sci USA 107 Suppl 1, 1765-1771 (2010).
[1599] 5. Rowley, J. D. Chromosome translocations: dangerous liaisons revisited. Nat Rev Cancer 1, 245-250 (2001).
[1600] 6. Aplan, P. D. Causes of oncogenic chromosomal translocation. Trends Genet 22, 46-55 (2006).
[1601] 7. McCarroll, S. A. & Altshuler, D. M. Copy-number variation and association studies of human disease. Nat Genet 39, S37-42 (2007).
[1602] 8. Wijnker, E. & de Jong, H. Managing meiotic recombination in plant breeding. Trends Plant Sci 13, 640-646 (2008).
[1603] 9. Petolino, J. F., Srivastava, V. & Daniell, H. Editing Plant Genomes: a new era of crop improvement. Plant Biotechnol J 14, 435-436 (2016).
[1604] 10. Smith, M. C. M. Phage-encoded Serine Integrases and Other Large Serine Recombinases. Microbiol Spectr 3 (2015).
[1605] 11. Meinke, G., Bohm, A., Hauber, J., Pisabarro, M. T. & Buchholz, F. Cre Recombinase and Other Tyrosine Recombinases. Chem Rev 116, 12785-12820 (2016).
[1606] 12. Karpinski, J. et al. Directed evolution of a recombinase that excises the provirus of most HIV-1 primary isolates with high specificity. Nat Biotechnol 34, 401-409 (2016).
[1607] 13. Olorunniji, F. J., Rosser, S. J. & Stark, W. M. Site-specific recombinases: molecular machines for the Genetic Revolution. Biochem J 473, 673-684 (2016).
[1608] 14. Grindley, N. D., Whiteson, K. L. & Rice, P. A. Mechanisms of site-specific recombination. Annu Rev Biochem 75, 567-605 (2006).
[1609] 15. Lukacsovich, T., Yang, D. & Waldman, A. S. Repair of a specific double-strand break generated within a mammalian chromosome by yeast endonuclease I-SceI. Nucleic Acids Res 22, 5649-5657 (1994).
[1610] 16. Rouet, P., Smih, F. & Jasin, M. Introduction of double-strand breaks into the genome of mouse cells by expression of a rare-cutting endonuclease. Mol Cell Biol 14, 8096-8106 (1994).
[1611] 17. Jeggo, P. A. DNA breakage and repair. Adv Genet 38, 185-218 (1998).
[1612] 18. Haapaniemi, E., Botla, S., Persson, J., Schmierer, B. & Taipale, J. CRISPR-Cas9 genome editing induces a p53-mediated DNA damage response. Nat Med 24, 927-930 (2018).
[1613] 19. Wang, B. et al. Highly efficient CRISPR/HDR-mediated knock-in for mouse embryonic stem cells and zygotes. Biotechniques 59, 201-202, 204, 206-208 (2015).
[1614] 20. Bogdanove, A. J., Bohm, A., Miller, J. C., Morgan, R. D. & Stoddard, B. L. Engineering altered protein-DNA recognition specificity. Nucleic Acids Res 46, 4845-4871 (2018).
[1615] 21. Tassabehji, M. Williams-Beuren syndrome: a challenge for genotype-phenotype correlations. Hum Mol Genet 12 Spec No 2, R229-237 (2003).
[1616] 22. Araki, K., Araki, M. & Yamamura, K. Targeted integration of DNA using mutant lox sites in embryonic stem cells. Nucleic Acids Res 25, 868-872 (1997).
[1617] 23. Araki, K., Okada, Y., Araki, M. & Yamamura, K. Comparative analysis of right element mutant lox sites on recombination efficiency in embryonic stem cells. BMC Biotechnol 10, 29 (2010).
[1618] 24. Thomson, J. G., Rucker, E. B., 3rd & Piedrahita, J. A. Mutational analysis of loxP sites for efficient Cre-mediated insertion into genomic DNA. Genesis 36, 162-167 (2003).
[1619] 25. Jusiak, B. et al. Comparison of Integrases Identifies Bxb1-GA Mutant as the Most Efficient Site-Specific Integrase System in Mammalian Cells. ACS Synth Biol 8, 16-24 (2019).
[1620] 26. Xie, F. et al. Adjusting the attB site in donor plasmid improves the efficiency of PhiC31 integrase system. DNA Cell Biol 31, 1335-1340 (2012).
[1621] 27. Gupta, M., Till, R. & Smith, M. C. Sequences in attB that affect the ability of phiC31 integrase to synapse and to activate DNA cleavage. Nucleic Acids Res 35, 3407-3419 (2007).
[1622] 28. Kolot, M., Malchin, N., Elias, A., Gritsenko, N. & Yagil, E. Site promiscuity of coliphage HK022 integrase as tool for gene therapy. Gene Ther 22, 602 (2015).
[1623] 29. Gaj, T., Mercer, A. C., Sirk, S. J., Smith, H. L. & Barbas, C. F., 3rd A comprehensive approach to zinc-finger recombinase customization enables genomic targeting in human cells. Nucleic Acids Res 41, 3937-3946 (2013).
[1624] 30. Chuang, K., Nguyen, E., Sergeev, Y. & Badea, T. C. Novel Heterotypic Rox Sites for Combinatorial Dre Recombination Strategies. G3 (Bethesda) 6, 559-571 (2015).
[1625] 31. Chaikind, B., Bessen, J. L., Thompson, D. B., Hu, J. H. & Liu, D. R. A programmable Cas9-serine recombinase fusion protein that operates on DNA sequences in mammalian cells. Nucleic Acids Res 44, 9758-9770 (2016).
[1626] 32. Gaj, T., Mercer, A. C., Gersbach, C. A., Gordley, R. M. & Barbas, C. F. Structure-guided reprogramming of serine recombinase DNA sequence specificity. P Natl Acad Sci USA 108, 498-503 (2011).
[1627] 33. Gaj, T., Sirk, S. J. & Barbas, C. F., 3rd Expanding the scope of site-specific recombinases for genetic and metabolic engineering. Biotechnol Bioeng 111, 1-15 (2014).
[1628] 34. Akopian, A., He, J., Boocock, M. R. & Stark, W. M. Chimeric recombinases with designed DNA sequence recognition. Proc Natl Acad Sci USA 100, 8688-8691 (2003).
[1629] 35. Prorocic, M. M. et al. Zinc-finger recombinase activities in vitro. Nucleic Acids Research 39, 9316-9328 (2011).
[1630] 36. Gersbach, C. A., Gaj, T., Gordley, R. M., Mercer, A. C. & Barbas, C. F. Targeted plasmid integration into the human genome by an engineered zinc-finger recombinase. Nucleic Acids Research 39, 7868-7878 (2011).
[1631] 37. Sirk, S. J., Gaj, T., Jonsson, A., Mercer, A. C. & Barbas, C. F. Expanding the zinc-finger recombinase repertoire: directed evolution and mutational analysis of serine recombinase specificity determinants. Nucleic Acids Research 42, 4755-4766 (2014).
[1632] 38. Gaj, T. & Barbas, C. F., 3rd Genome engineering with custom recombinases. Methods Enzymol 546, 79-91 (2014).
[1633] 39. Olorunniji, F. J., Rosser, S. J. & Marshall Stark, W. Purification and In Vitro Characterization of Zinc Finger Recombinases. Methods Mol Biol 1642, 229-245 (2017).
[1634] 40. Proudfoot, C., McPherson, A. L., Kolb, A. F. & Stark, W. M. Zinc finger recombinases with adaptable DNA sequence specificity. PLoS One 6, e19537 (2011).
[1635] 41. Irion, S. et al. Identification and targeting of the ROSA26 locus in human embryonic stem cells. Nat Biotechnol 25, 1477-1482 (2007).
[1636] 42. Sadelain, M., Papapetrou, E. P. & Bushman, F. D. Safe harbours for the integration of new DNA in the human genome. Nat Rev Cancer 12, 51-58 (2012).
[1637] 43. Pellenz, S. et al. New human chromosomal safe harbor sites for genome engineering with CRISPR/Cas9, TAL effector and homing endonucleases. bioRxiv (2019).
[1638] 44. Brown, W. R., Lee, N. C., Xu, Z. & Smith, M. C. Serine recombinases as tools for genome engineering. Methods 53, 372-379 (2011).
[1639] 45. Xu, Z. et al. Accuracy and efficiency define Bxb1 integrase as the best of fifteen candidate serine recombinases for the integration of DNA into the human genome. BMC Biotechnol 13, 87 (2013).
[1640] 46. Thyagarajan, B., Guimaraes, M. J., Groth, A. C. & Calos, M. P. Mammalian genomes contain active recombinase recognition sites. Gene 244, 47-54 (2000).
[1641] 47. Shultz, J. L., Voziyanova, E., Konieczka, J. H. & Voziyanov, Y. A genome-wide analysis of FRT-like sequences in the human genome. PLoS One 6, e18077 (2011).
[1642] 48. Thyagarajan, B., Olivares, E. C., Hollis, R. P., Ginsburg, D. S. & Calos, M. P. Site-specific genomic integration in mammalian cells mediated by phage phiC31 integrase. Mol Cell Biol 21, 3926-3934 (2001).
[1643] 49. Sivalingam, J. et al. Biosafety assessment of site-directed transgene integration in human umbilical cord-lining cells. Mol Ther 18, 1346-1356 (2010).
[1644] 50. Ortiz-Urda, S. et al. Stable nonviral genetic correction of inherited human skin disease. Nat Med 8, 1166-1170 (2002).
[1645] 51. Chalberg, T. W. et al. Integration specificity of phage phiC31 integrase in the human genome. J Mol Biol 357, 28-48 (2006).
[1646] 52. Thyagarajan, B. et al. Creation of engineered human embryonic stem cell lines using phiC31 integrase. Stem Cells 26, 119-126 (2008).
[1647] 53. Olivares, E. C. et al. Site-specific genomic integration produces therapeutic Factor IX levels in mice. Nat Biotechnol 20, 1124-1128 (2002).
[1648] 54. Hollis, R. P. et al. Phage integrases for the construction and manipulation of transgenic mammals. Reprod Biol Endocrinol 1, 79 (2003).
[1649] 55. Held, P. K. et al. In vivo correction of murine hereditary tyrosinemia type I by phiC31 integrase-mediated gene delivery. Mol Ther 11, 399-408 (2005).
[1650] 56. Ma, H. et al. PhiC31 integrase induces efficient site-specific recombination in the Capra hircus genome. DNA Cell Biol 33, 484-491 (2014).
[1651] 57. Bi, Y. et al. Pseudo attP sites in favor of transgene integration and expression in cultured porcine cells identified by Streptomyces phage phiC31 integrase. BMC Mol Biol 14, 20 (2013).
[1652] 58. Ma, Q. W. et al. Identification of pseudo attP sites for phage phiC31 integrase in bovine genome. Biochem Biophys Res Commun 345, 984-988 (2006).
[1653] 59. Qu, L. et al. Global mapping of binding sites for phic31 integrase in transgenic maden-darby bovine kidney cells using ChIP-seq. Hereditas 156, 3 (2019).
[1654] 60. Ghahfarokhi, M. K., Dormiani, K., Mohammadi, A., Jafarpour, F. & Nasr-Esfahani, M. H.
[1655] Blastocyst Formation Rate and Transgene Expression are Associated with Gene Insertion into Safe and Non-Safe Harbors in the Cattle Genome. Sci Rep 7, 15432 (2017).
[1656] 61. Groth, A. C., Fish, M., Nusse, R. & Calos, M. P. Construction of transgenic Drosophila by using the site-specific integrase from phage phiC31. Genetics 166, 1775-1782 (2004).
[1657] 62. Chalberg, T. W., Genise, H. L., Vollrath, D. & Calos, M. P. phiC31 integrase confers genomic integration and long-term transgene expression in rat retina. Invest Ophthalmol Vis Sci 46, 2140-2146 (2005).
[1658] 63. Keravala, A. et al. A diversity of serine phage integrases mediate site-specific recombination in mammalian cells. Mol Genet Genomics 276, 135-146 (2006).
[1659] 64. Lei, X., Wang, L., Zhao, G. & Ding, X. Site-specificity of serine integrase demonstrated by the attB sequence preference of BT1 integrase. FEBS Lett 592, 1389-1399 (2018).
[1660] 65. Chu, V. T. et al. Increasing the efficiency of homology-directed repair for CRISPR-Cas9-induced precise gene editing in mammalian cells. Nat Biotechnol 33, 543-548 (2015).
[1661] 66. Yu, C. et al. Small molecules enhance CRISPR genome editing in pluripotent stem cells. Cell Stem Cell 16, 142-147 (2015).
[1662] 67. Paquet, D. et al. Efficient introduction of specific homozygous and heterozygous mutations using CRISPR/Cas9. Nature 533, 125 (2016).
[1663] 68. Martsolf, J. T. et al. Complete trisomy 17p a relatively new syndrome. Ann Genet 31, 172-174 (1988).
[1664] 69. Bird, T. D. in GeneReviews(®). (eds. M. P. Adam et al.) (Seattle (Wash.); 1993).
[1665] 70. Smith, A. C. M. et al. in GeneReviews(®). (eds. M. P. Adam et al.) (Seattle (Wash.); 1993).
[1666] 71. Dupuy, O. et al. [De La Chapelle syndrome]. Presse Med 30, 369-372 (2001).
[1667] 72. Jyothy, A. et al. Translocation Down syndrome. Indian J Med Sci 56, 122-126 (2002).
[1668] 73. Lakich, D., Kazazian, H. H., Jr., Antonarakis, S. E. & Gitschier, J. Inversions disrupting the factor VIII gene are a common cause of severe haemophilia A. Nat Genet 5, 236-241 (1993).
[1669] 74. Bondeson, M. L. et al. Inversion of the IDS gene resulting from recombination with IDS-related sequences is a common cause of the Hunter syndrome. Hum Mol Genet 4, 615-621 (1995).
[1670] 75. Abremski, K. & Hoess, R. Bacteriophage P1 site-specific recombination. Purification and properties of the Cre recombinase protein. J Biol Chem 259, 1509-1514 (1984).
[1671] 76. Sauer, B. & McDermott, J. DNA recombination with a heterospecific Cre homolog identified from comparison of the pac-c1 regions of P1-related phages. Nucleic Acids Res 32, 6086-6095 (2004).
[1672] 77. Suzuki, E. & Nakayama, M. VCre/VloxP and SCre/SloxP: new site-specific recombination systems for genome engineering. Nucleic Acids Res 39, e49 (2011).
[1673] 78. Sadowski, P. D. The Flp recombinase of the 2-microns plasmid of Saccharomyces cerevisiae. Prog Nucleic Acid Res Mol Biol 51, 53-91 (1995).
[1674] 79. Nern, A., Pfeiffer, B. D., Svoboda, K. & Rubin, G. M. Multiple new site-specific recombinases for use in manipulating animal genomes. Proc Natl Acad Sci USA 108, 14198-14203 (2011).
[1675] 80. Ringrose, L., Angrand, P. O. & Stewart, A. F. The Kw recombinase, an integrase from Kluyveromyces waltii. Eur J Biochem 248, 903-912 (1997).
[1676] 81. Araki, H. et al. Site-specific recombinase, R, encoded by yeast plasmid pSR1. J Mol Biol 225, 25-37 (1992).
[1677] 82. Blaisonneau, J., Sor, F., Cheret, G., Yarrow, D. & Fukuhara, H. A circular plasmid from the yeast Torulaspora delbrueckii. Plasmid 38, 202-209 (1997).
[1678] 83. Karimova, M. et al. Vika/vox, a novel efficient and specific Cre/loxP-like site-specific recombination system. Nucleic Acids Res 41, e37 (2013).
[1679] 84. Karimova, M., Splith, V., Karpinski, J., Pisabarro, M. T. & Buchholz, F. Discovery of Nigri/nox and Panto/pox site-specific recombinase systems facilitates advanced genome engineering. Sci Rep 6, 30130 (2016).
[1680] 85. Buchholz, F. & Stewart, A. F. Alteration of Cre recombinase site specificity by substrate-linked protein evolution. Nat Biotechnol 19, 1047-1052 (2001).
[1681] 86. Santoro, S. W. & Schultz, P. G. Directed evolution of the site specificity of Cre recombinase. Proc Natl Acad Sci USA 99, 4185-4190 (2002).
[1682] 87. Sarkar, I., Hauber, I., Hauber, J. & Buchholz, F. HIV-1 proviral DNA excision using an evolved recombinase. Science 316, 1912-1915 (2007).
[1683] 88. Rufer, A. W. & Sauer, B. Non-contact positions impose site selectivity on Cre recombinase. Nucleic Acids Res 30, 2764-2771 (2002).
[1684] 89. Kim, A. I. et al. Mycobacteriophage Bxb1 integrates into the Mycobacterium smegmatis groEL1 gene. Mol Microbiol 50, 463-473 (2003).
[1685] 90. Brown, D. P., Idler, K. B. & Katz, L. Characterization of the genetic elements required for site-specific integration of plasmid pSE211 in Saccharopolyspora erythraea. J Bacteriol 172, 1877-1888 (1990).
[1686] 91. Matsuura, M. et al. A GENE ESSENTIAL FOR THE SITE-SPECIFIC EXCISION OF ACTINOPHAGE R4 PROPHAGE GENOME FROM THE CHROMOSOME OF A LYSOGEN. The Journal of General and Applied Microbiology 41, 53-61 (1995).
[1687] 92. Gregory, M. A., Till, R. & Smith, M. C. Integration site for Streptomyces phage phiBT1 and development of site-specific integrating vectors. J Bacteriol 185, 5320-5323 (2003).
[1688] 93. Yang, H. Y., Kim, Y. W. & Chang, H. I. Construction of an integration-proficient vector based on the site-specific recombination mechanism of enterococcal temperate phage phiFCl. J Bacteriol 184, 1859-1864 (2002).
[1689] 94. Rashel, M. et al. A novel site-specific recombination system derived from bacteriophage phiMR11. Biochem Biophys Res Commun 368, 192-198 (2008).
[1690] 95. Christiansen, B., Johnsen, M. G., Stenby, E., Vogensen, F. K. & Hammer, K.
[1691] Characterization of the lactococcal temperate phage TP901-1 and its site-specific integration. J Bacteriol 176, 1069-1076 (1994).
[1692] 96. Loessner, M. J., Inman, R. B., Lauer, P. & Calendar, R. Complete nucleotide sequence, molecular analysis and genome structure of bacteriophage A118 of Listeria monocytogenes: implications for phage evolution. Mol Microbiol 35, 324-340 (2000).
[1693] 97. Lauer, P., Chow, M. Y., Loessner, M. J., Portnoy, D. A. & Calendar, R. Construction, characterization, and use of two Listeria monocytogenes site-specific phage integration vectors. J Bacteriol 184, 4177-4186 (2002).
[1694] 98. Bibb, L. A., Hancox, M. I. & Hatfull, G. F. Integration and excision by the large serine recombinase phiRv1 integrase. Mol Microbiol 55, 1896-1910 (2005).
[1695] 99. Canchaya, C. et al. Genome analysis of an inducible prophage and prophage remnants integrated in the Streptococcus pyogenes strain SF370. Virology 302, 245-258 (2002).
[1696] 100. Morita, K. et al. The site-specific recombination system of actinophage TG1. FEMS Microbiol Lett 297, 234-240 (2009).
[1697] 101. Fouts, D. E. et al. Sequencing Bacillus anthracis typing phages gamma and cherry reveals a common ancestry. J Bacteriol 188, 3402-3408 (2006).
[1698] 102. Kilcher, S., Loessner, M. J. & Klumpp, J. Brochothrix thermosphacta bacteriophages feature heterogeneous and highly mosaic genomes and utilize unique prophage insertion sites. J Bacteriol 192, 5441-5453 (2010).
[1699] 103. Lazarevic, V. et al. Nucleotide sequence of the Bacillus subtilis temperate bacteriophage SPbetac2. Microbiology 145 (Pt 5), 1055-1067 (1999).
[1700] 104. Fogg, P. C. M., Haley, J. A., Stark, W. M. & Smith, M. C. M. Genome Integration and Excision by a New Streptomyces Bacteriophage, varphiJoe. Appl Environ Microbiol 83 (2017).
[1701] 105. Yang, L. et al. Permanent genetic memory with >1-byte capacity. Nat Methods 11, 1261-1266 (2014).
[1702] 106. Rutherford, K., Yuan, P., Perry, K., Sharp, R. & Van Duyne, G. D. Attachment site recognition and regulation of directionality by the serine integrases. Nucleic Acids Res 41, 8341-8356 (2013).
[1703] 107. Singh, S., Rockenbach, K., Dedrick, R. M., VanDemark, A. P. & Hatfull, G. F. Cross-talk between diverse serine integrases. J Mol Biol 426, 318-331 (2014).
[1704] 108. Gupta, N. et al. Cross-talk between cognate and noncognate RpoE sigma factors and Zn(2+)-binding anti-sigma factors regulates photooxidative stress response in Azospirillum brasilense. Antioxid Redox Signal 20, 42-59 (2014).
[1705] 109. Kahmann, R., Rudt, F., Koch, C. & Mertens, G. G inversion in bacteriophage Mu DNA is stimulated by a site within the invertase gene and a host factor. Cell 41, 771-780 (1985).
[1706] 110. Iida, S., Meyer, J., Kennedy, K. E. & Arber, W. A site-specific, conservative recombination system carried by bacteriophage P1. Mapping the recombinase gene cin and the cross-over sites cix for the inversion of the C segment. EMBO J 1, 1445-1453 (1982).
[1707] 111. Glasgow, A. C., Bruist, M. F. & Simon, M. I. DNA-binding properties of the Hin recombinase. J Biol Chem 264, 10072-10082 (1989).
[1708] 112. Iida, S. et al. The Min DNA inversion enzyme of plasmid p15B of Escherichia coli 15T-: a new member of the Din family of site-specific recombinases. Mol Microbiol 4, 991-997 (1990).
[1709] 113. Rowland, S. J., Stark, W. M. & Boocock, M. R. Sin recombinase from Staphylococcus aureus: synaptic complex architecture and transposon targeting. Mol Microbiol 44, 607-619 (2002).
[1710] 114. Kolot, M., Silberstein, N. & Yagil, E. Site-specific recombination in mammalian cells expressing the Int recombinase of bacteriophage HK022. Mol Biol Rep 26, 207-213 (1999).
[1711] 115. Cho, E. H., Nam, C. E., Alcaraz, R., Jr. & Gardner, J. F. Site-specific recombination of bacteriophage P22 does not require integration host factor. J Bacteriol 181, 4245-4249 (1999).
[1712] 116. Lee, M. H., Pascopella, L., Jacobs, W. R., Jr. & Hatfull, G. F. Site-specific integration of mycobacteriophage L5: integration-proficient vectors for Mycobacterium smegmatis, Mycobacterium tuberculosis, and bacille Calmette-Guerin. Proc Natl Acad Sci USA 88, 3111-3115 (1991).

### Example 18—Incorporation of 3′ Toeloop in the Primer Binding Site (PBS) Improves PEgRNA Activity

[1713] In order to further improve PE activity, the inventors contemplated adding a toeloop sequence at the 3′ end of a PEgRNA having a 3′ extension arm. FIG. 71A provides an example of a generic SpCas9 PEgRNA having a 3′ extension arm (top molecule). The 3′ extension arm, in turn, comprises an RT template (that includes that the desired edit) and a primer binding site (PBS) at the 3′ end of the molecule. The molecule terminates with a poly(U) sequence comprising three U nucleobases (i.e., 5′-UUU-3′).

[1714] By contrast, the bottom portion of FIG. 71A shows the same PEgRNA molecule as the top portion of FIG. 71A, but wherein a 9-nucleobase sequence of 5′-GAAANNNNN-3′ has been inserted between the 3′ end of the primer binding site and the 5′ end of the terminal poly(U) sequence. This structure folds back on itself by 1800 to form a “toeloop” RNA structure, wherein the sequences of 5′-NNNNN-3′ of the 9-nucleobase insertion anneals with a complementary sequence in the primer binding site, and wherein the 5′-GAAA-3′ portion forms the 1800 turn. The features of the toeloop sequence depicted in FIG. 71A is not intended to limit or narrow the scope of possible toeloops that could be used in its place. Further, the sequence of the toeloop will depend upon the complementary sequence of the primer binding site. Essentially though, the toeloop sequence, in various embodiments, may have a first sequence portion that forms a 180°, and a second sequence portion that has a sequence that is complementary to a portion of the primer binding site.

[1715] Without being bound by theory, the toeloop sequence is thought to enable PEgRNA the use of PEgRNAs with increasingly longer primer binding sites than would otherwise be possible. Longer PBS sequences, in turn, are thought to improve PE activity. PEgRNA More in particular, the likely function of the toeloop is to occlude or at least minimize the PBS from interacting with the spacer. Stable hairpin formation between the PBS and the spacer can lead to an inactive PEgRNA. Without a toeloop, this interaction may require restricting the length of the PBS. Blocking or minimizing the interaction between the spacer and the PBS using a 3′ end toeloop may lead to an improvement in PE activity.

### Example 19—Prime Editing with Alternative Nucleic Acid Templates and Editor Protein Constructs

[1716] Prior to this example, prime editing is described as requiring a PEgRNA. Exemplary embodiments describing possible configurations of suitable PEgRNA for use in prime editing are depicted in FIG. 3A (a PEgRNA with a 5′ extension arm), FIG. 3B (a PEgRNA with a 3′ extension arm), FIG. 3C (an internally extended PEgRNA), FIG. 3D (a PEgRNA with a 3′ extension arm, and comprising a primer binding site, edit template, homology arm, and optional 3′ and 5′ modifier regions, and a region indicated as the DNA synthesis template), and FIG. 3E (a PEgRNA with a 5′ extension arm, and comprising a primer binding site, edit template, homology arm, and optional 3′ and 5′ modifier regions, and a region indicated as the DNA synthesis template). In addition, PEgRNA structure and composition are described extensively herein in the Detailed Description and throughout.

[1717] This Example describes additional design variations of PEgRNAs—in some cases, PEgRNAs which are wholly or partially chemically synthesized outside the cell—that are envisioned to work in conjunction with the prime editors of this Specification. Such alternative designs may improve various aspects of prime editing, including the insertion of longer DNA sequences by prime editing, the use of alternative polymerases (i.e., alternatives to reverse transcriptase) that potentially operate with increased efficiency and/or fidelity, and the use or recruitment of alternative and/or addition prime editor protein effector components to enhance or augment prime editing. In addition, the use of chemically synthesized PEgRNAs may potentially lead to the production of molecules that are more stable and possess desirable features that enhance prime editing efficiency and capabilities.

[1718] PEgRNA serves as the nucleic acid template that encodes the desired edited genetic information that is to be incorporated into a target site. In one aspect, a PEgRNA is created by adding an extension arm to either the 5′ end or 3′ end of an sgRNA (e.g., as shown in the embodiments of FIG. 3A, 3B, 3D, or 3E), or by inserting a similar sequence internally within an sgRNA (e.g., as shown in the embodiment of FIG. 3C), wherein the extension arm comprises a DNA synthesis template that is capable of encoding a ssDNA product by a polymerase (e.g., a reverse transcriptase) and which includes the edited genetic information of interest. The extension arm comprises a primer binding site (PBS) for annealing to the napDNAbp-nicked genomic DNA strand, and a DNA synthesis template to encode t the edited DNA strand of interest, which becomes incorporated into the endogenous DNA target site by replacing the counterpart DNA strand. PEgRNA can be expressed within cells from plasmid DNA or a genomically integrated DNA cassette, or they can be made outside of cells by in vitro transcription or by chemical synthesis and subsequently delivered into cells. Preparation of PEgRNAs outside of cells, particularly by chemical synthesis, offers an opportunity to modify the PEgRNAs substantially. This invention describes alternative designs for prime editing templates (FIG. 72).

(A) DNA Synthesis Template Expressed as a Separate Molecules from Guide RNAs (i.e., DNA Synthesis Template Provided in Trans to the Prime Editor Complex (napDNAbp+Guide RNA).

[1719] In various embodiments described herein, prime editing utilizes a single PEgRNA that serves as both the programmable targeting molecules and the edit-encoding molecule. This embodiment is depicted in FIG. 72(a) with a PEgRNA having a 3′ extension arm. However, in some cases, this could be disadvantageous, particularly for more complex PEgRNA molecules such as those that encode a large insertion. These RNAs could contain extensive secondary structure that interferes with the PEgRNA scaffold structure and interactions with Cas9. Alternatively, prime editing can be carried out by substituting a PEgRNA with two separate RNA molecules: an sgRNA, and a trans prime editing RNA template (tPERT), as depicted in FIG. 72B. The sgRNA serves to target Cas9 (or more generally, the napDNAbp) to the desired genomic target site, while the tPERT is used by the polymerase (e.g., a reverse transcriptase) to write new DNA sequence into the target locus.

[1720] In general, simple expression of a tPERT leads to lower editing efficiency compared to a PEgRNA. However, the efficiency of trans prime editing can be enhanced by the introduction of one or more MS2 RNA aptamers into the tPERT RNA, along with a fusion of the MS2 coat protein (MS2cp) to the prime editor protein (to make MS2cp-Cas9-RT). This allows for the MS2 RNA aptamer to bind to the MS2cp, thereby co-localizing the tPERT (which comprises the DNA synthesis template) to the site of editing by the prime editor complex. The MS2 aptamer is preferably placed on the 3′ end of the tPERT to avoid reverse transcription of the aptamer sequence.

[1721] Although this example utilizes the MS2 tagging technique (comprising the MS2 RNA aptamer on the tPERT paired with the MS2cp protein fused to the prime editor), other RNA-protein recruitment systems can be used in the alternative. The general concept envisioned here is that the DNA synthesis template of the tPERT is modified to contain an RNA recruitment secondary structure (e.g., a specialized hairpin like the MS2 aptamer) so that the tPERT may be recruited by a modified prime editor fusion protein that further comprises an RNA-binding protein that specifically recognizes and binds to the RNA recruitment second structure on the tPERT molecule. A review of other RNA-protein recruitment domains are described in the art, for example, in Johansson et al., “RNA recognition by the MS2 phage coat protein,” Sem Virol., 1997, Vol. 8(3): 176-185; Delebecque et al., “Organization of intracellular reactions with rationally designed RNA assemblies,” Science, 2011, Vol. 333: 470-474; Mali et al., “Cas9 transcriptional activators for target specificity screening and paired nickases for cooperative genome engineering,” Nat. Biotechnol., 2013, Vol. 31: 833-838; and Zalatan et al., “Engineering complex synthetic transcriptional programs with CRISPR RNA scaffolds,” Cell, 2015, Vol. 160: 339-350, each of which are incorporated herein by reference in their entireties. Other systems include the PP7 hairpin, which specifically recruits the PCP protein, and the “com” hairpin, which specifically recruits the Com protein. See Zalatan et al. Any of these well-known recruitment systems may be employed with trans prime editing as described herein.

[1722] The efficiency of the instant tPERT trans prime editing system was tested. Up to 20% efficiency of His6 insertion (18 bp) was achieved at the HEK3 site in HEK293T cells using a tPERT containing a single 3′ MS2 aptamer, a 13-nt primer binding site, and an RT template containing the insertion sequence and 34 nt of homology to the locus, along with an editor containing the MS2cp fused to the N-terminus of PE2. See FIG. 73. The strategy of trans prime editing has the potential to address complications associated with PEgRNAPEgRNA design, and could be more suited for longer RT templates to achieve larger insertion, deletions, or edits at further distances from the prime editor nick site.

(B) Chemically Synthesized PEgRNAs with RNA and DNA Synthesis Templates

[1723] Alternative nucleic acid templates can be used within chemically synthesized PEgRNAs (FIG. 72C). For example, a synthetic PEgRNA can be constructed as an RNA/DNA hybrid wherein the spacer sequence and sgRNA scaffold is composed of RNA nucleotides and the primer binding site and synthesis template (shown as a 3′ extension in FIG. 72C) is composed of DNA nucleotides. This could allow for DNA-dependent DNA polymerases to be used in place of reverse transcriptase within prime editors. It could also prevent the synthesis of DNA that is templated by sgRNA scaffold sequence. In other designs, chemical linkers, composed of non-templating nucleotides or other suitable linker moieties, can be used to tether the nucleic acid edit template (composed of RNA or DNA) to the sgRNA scaffold. This could prevent continued DNA polymerization of the sgRNA scaffold and allow for flexibility in the extension that allows for more efficient templated synthesis. Finally, the directionality of the nucleic acid synthesis template can be inverted such that DNA polymerization proceeds away from the sgRNA scaffold as opposed to toward it.

### (C) Recruitment of the DNA Polymerase Expressed in Trans

[1724] In the main embodiment of prime editing, the polymerase (e.g., reverse transcriptase enzyme) is expressed as a fusion to the napDNAbp (e.g., Cas9 nickase). Alternatively, the polymerase (e.g., reverse transcriptase) can be expressed in trans, and its activity can be localized to the editing site using recruitment systems such as the MS2 RNA aptamer and MS2 coat protein, or other similar recruitment system known in the art. In this system, the PEgRNA is modified to include an MS2 aptamer within one of the sgRNA scaffold hairpins, and the polymerase (e.g., reverse transcriptase) is expressed as a fusion protein to MS2cp. The napDNAbp (e.g., Cas9 nickase) is also expressed as an independent polypeptide. This system has been demonstrated with the wild type M-MLV reverse transcriptase (FIG. 74), and should be applicable to other RT variants. In addition, other RNA-protein interactions, or protein-protein interactions, could be used for RT recruitment.

The following sequences are pertinent to Example 19:

Sequences of tPERTs:
MS2 aptamer/RT template/PBS/Linker
5′-MS2_13nt-PBS:
(SEQ ID NO: 762)
5′GCCAACATGAGGATCACCCATGTCTGCAGGGCCTGGAGGAAGCAGGGCTTCC
TTTCCTCTGCCATCAATGATGGTGATGATGGTGCGTGCTCAGTCTG - 3′
5′-MS2_17nt-PBS:
(SEQ ID NO: 773)
5′GCCAACATGAGGATCACCCATGTCTGCAGGGCCTGGAGGAAGCAGGGCTTCC
TTTCCTCTGCCATCAATGATGGTGATGATGGTGCGTGCTCAGTCTGGGCC - 3′
3′-MS2_13nt-PBS:
(SEQ ID NO: 774)
5′GGAGGAAGCAGGGCTTCCTTTCCTCTGCCATCAATGATGGTGATGATGGT
GCGTGCTCAGTCTGAAATTAACAAATCAAGCCAACATGAGGATCACCCATGTCT
GCAGGGCC - 3′
3′-MS2_17nt-PBS:
(SEQ ID NO: 775)
5′GGAGGAAGCAGGGCTTCCTTTCCTCTGCCATCAATGATGGTGATGATGGT
GCGTGCTCAGTCTGGGCCAAATTAACAAATCAAGCCAACATGAGGATCACCCAT
GTCTGCAGGGCC - 3′
Sequences of MS2 PEgRNAs:
Spacer/MS2 aptamer/sgRNA scaffold/RT template/PBS
HEK3_MS2_1
(SEQ ID NO: 776)
5′GGCCCAGACTGAGCACGTGAGTTTTAGAGCTAGGCCAACATGAGGATCACCCA
TGTCTGCAGGGCCTAGCAAGTTAAAATAAGGCTAGTCCGTTATCAACTTGAAAAAGTG
GGACCGAGTCGGTCCTCTGCCATCTCGTGCTCAGTCT - 3′
HEK3_MS2_2
(SEQ ID NO: 777)
5′GGCCCAGACTGAGCACGTGAGTTTTAGAGCTAGAAATAGCAAGTTAAAATAAGGC
TAGTCCGTTATCAACTTGGCCAACATGAGGATCACCCATGTCTGCAGGGCCAAGTG
GGACCGAGTCGGTCCTCTGCCATCTCGTGCTCAGTCT - 3′
Protein sequences:
MS2cp-PE2
(SEQ ID NO: 778)
MKRTADGSEFESPKKKRKVGSASNFTQFVLVDNGGTGDVTVAPSNFANGVAEWISS
NSRSQAYKVTCSVRQSSAQNRKYTIKVEVPKVATQTVGGEELPVAGWRSYLNMELT
IPIFATNSDCELIVKAMQGLLKDGNPIPSAIAANSGIYSGGSSGGSSGSETPGTSESATP
ESSGGSSGGSSDKKYSIGLDIGTNSVGWAVITDEYKVPSKKFKVLGNTDRHSIKKNLIGALL
FDSGETAEATRLKRTARRRYTRRKNRICYLQEIFSNEMAKVDDSFFHRLEESFLVEEDKKH
ERHPIFGNIVDEVAYHEKYPTIYHLRKKLVDSTDKADLRLIYLALAHMIKFRGHFLIEGDLN
PDNSDVDKLFIQLVQTYNQLFEENPINASGVDAKAILSARLSKSRRLENLIAQLPGEKKNGL
FGNLIALSLGLTPNFKSNFDLAEDAKLQLSKDTYDDDLDNLLAQIGDQYADLFLAAKNLS
DAILLSDILRVNTEITKAPLSASMIKRYDEHHQDLTLLKALVRQQLPEKYKEIFFDQSKNGY
AGYIDGGASQEEFYKFIKPILEKMDGTEELLVKLNREDLLRKQRTFDNGSIPHQIHLGELH
AILRRQEDFYPFLKDNREKIEKILTFRIPYYVGPLARGNSRFAWMTRKSEETITPWNFEEVV
DKGASAQSFIERMTNFDKNLPNEKVLPKHSLLYEYFTVYNELTKVKYVTEGMRKPAFLSG
EQKKAIVDLLFKTNRKVTVKQLKEDYFKKIECFDSVEISGVEDRFNASLGTYHDLLKIIKDK
DFLDNEENEDILEDIVLTLTLFEDREMIEERLKTYAHLFDDKVMKQLKRRRYTGWGRLSR
KLINGIRDKQSGKTILDFLKSDGFANRNFMQLIHDDSLTFKEDIQKAQVSGQGDSLHEHIA
NLAGSPAIKKGILQTVKVVDELVKVMGRHKPENIVIEMARENQTTQKGQKNSRERMKRIE
EGIKELGSQILKEHPVENTQLQNEKLYLYYLQNGRDMYVDQELDINRLSDYDVDAIVPQSF
LKDDSIDNKVLTRSDKNRGKSDNVPSEEVVKKMKNYWRQLLNAKLITQRKFDNLTKAERG
GLSELDKAGFIKRQLVETRQITKHVAQILDSRMNTKYDENDKLIREVKVITLKSKLVSDFRK
DFQFYKVREINNYHHAHDAYLNAVVGTALIKKYPKLESEFVYGDYKVYDVRKMIAKSEQEI
GKATAKYFFYSNIMNFFKTEITLANGEIRKRPLIETNGETGEIVWDKGRDFATVRKVLSMP
QVNIVKKTEVQTGGFSKESILPKRNSDKLIARKKDWDPKKYGGFDSPTVAYSVLVVAKVEK
GKSKKLKSVKELLGITIMERSSFEKNPIDFLEAKGYKEVKKDLIIKLPKYSLFELENGRKRM
LASAGELQKGNELALPSKYVNFLYLASHYEKLKGSPEDNEQKQLFVEQHKHYLDEIIEQIS
EFSKRVILADANLDKVLSAYNKHRDKPIREQAENIIHLFTLTNLGAPAAFKYFDTTIDRKRY
TSTKEVLDATLIHQSITGLYETRIDLSQLGGDSGGSSGGSSGSETPGTSESATPESSGGSSGG
SSTLNIEDEYRLHETSKEPDVSLGSTWLSDFPQAWAETGGMGLAVRQAPLIIPLKATSTPVS
IKQYPMSQEARLGIKPHIQRLLDQGILVPCQSPWNTPLLPVKKPGTNDYRPVQDLREVNK
RVEDIHPTVPNPYNLLSGLPPSHQWYTVLDLKDAFFCLRLHPTSQPLFAFEWRDPEMGIS
GQLTWTRLPQGFKNSPTLFNEALHRDLADFRIQHPDLILLQYVDDLLLAATSELDCQQGT
RALLQTLGNLGYRASAKKAQICQKQVKYLGYLLKEGQRWLTEARKETVMGQPTPKTPRQ
LREFLGKAGFCRLFIPGFAEMAAPLYPLTKPGTLFNWGPDQQKAYQEIKQALLTAPALGL
PDLTKPFELFVDEKQGYAKGVLTQKLGPWRRPVAYLSKKLDPVAAGWPPCLRMVAAIAV
LTKDAGKLTMGQPLVILAPHAVEALVKQPPDRWLSNARMTHYQALLLDTDRVQFGPVVA
LNPATLLPLPEEGLQHNCLDILAEAHGTRPDLTDQPLPDADHTWYTDGSSLLQEGQRKA
GAAVTTETEVIWAKALPAGTSAQRAELIALTQALKMAEGKKLNVYTDSRYAFATAHIHGEIY
RRRGWLTSEGKEIKNKDEILALLKALFLPKRLSIIHCPGHQKGHSAEARGNRMADQAARK
AAITETPDTSTLLIENSSPSGGSKRTADGSEFEPKKKRKV
MS2cp-MMLV-RT
(SEQ ID NO: 779)
MKRTADGSEFESPKKKRKVGSASNFTQFVLVDNGGTGDVTVAPSNFANGVAEWISS
NSRSQAYKVTCSVRQSSAQNRKYTIKVEVPKVATQTVGGEELPVAGWRSYLNMELT
IPIFATNSDCELIVKAMQGLLKDGNPIPSAIAANSGIYSGGSSGGSSGSETPGTSESATP
ESSGGSSGGSSTLNIEDEYRLHETSKEPDVSLGSTWLSDFPQAWAETGGMGLAVRQAPLII
PLKATSTPVSIKQYPMSQEARLGIKPHIQRLLDQGILVPCQSPWNTPLLPVKKPGTNDYRP
VQDLREVNKRVEDIHPTVPNPYNLLSGLPPSHQWYTVLDLKDAFFCLRLHPTSQPLFAFE
WRDPEMGISGQLTWTRLPQGFKNSPTLFDEALHRDLADFRIQHPDLILLQYVDDLLLAAT
SELDCQQGTRALLQTLGNLGYRASAKKAQICQKQVKYLGYLLKEGQRWLTEARKETVMG
QPTPKTPRQLREFLGTAGFCRLWIPGFAEMAAPLYPLTKTGTLFNWGPDQQKAYQEIKQ
ALLTAPALGLPDLTKPFELFVDEKQGYAKGVLTQKLGPWRRPVAYLSKKLDPVAAGWPP
CLRMVAAIAVLTKDAGKLTMGQPLVILAPHAVEALVKQPPDRWLSNARMTHYQALLLDTD
RVQFGPVVALNPATLLPLPEEGLQHNCLDILAEAHGTRPDLTDQPLPDADHTWYTDGSSL
LQEGQRKAGAAVTTETEVIWAKALPAGTSAQRAELIALTQALKMAEGKKLNVYTDSRYAFA
TAHIHGEIYRRRGLLTSEGKEIKNKDEILALLKALFLPKRLSIIHCPGHQKGHSAEARGNRM
ADQAARKAAITETPDTSTLLIENSSPSGGSKRTADGSEFEPKKKRKV
MMLV-RT-MS2cp
(SEQ ID NO: 780)
MKRTADGSEFESPKKKRKVTLNIEDEYRLHETSKEPDVSLGSTWLSDFPQAWAETGGM
GLAVRQAPLIIPLKATSTPVSIKQYPMSQEARLGIKPHIQRLLDQGILVPCQSPWNTPLLPV
KKPGTNDYRPVQDLREVNKRVEDIHPTVPNPYNLLSGLPPSHQWYTVLDLKDAFFCLRLH
PTSQPLFAFEWRDPEMGISGQLTWTRLPQGFKNSPTLFDEALHRDLADFRIQHPDLILLQ
YVDDLLLAATSELDCQQGTRALLQTLGNLGYRASAKKAQICQKQVKYLGYLLKEGQRWLT
EARKETVMGQPTPKTPRQLREFLGTAGFCRLWIPGFAEMAAPLYPLTKTGTLFNWGPDQ
QKAYQEIKQALLTAPALGLPDLTKPFELFVDEKQGYAKGVLTQKLGPWRRPVAYLSKKLD
PVAAGWPPCLRMVAAIAVLTKDAGKLTMGQPLVILAPHAVEALVKQPPDRWLSNARMTH
YQALLLDTDRVQFGPVVALNPATLLPLPEEGLQHNCLDILAEAHGTRPDLTDQPLPDADH
TWYTDGSSLLQEGQRKAGAAVTTETEVIWAKALPAGTSAQRAELIALTQALKMAEGKKLN
VYTDSRYAFATAHIHGEIYRRRGLLTSEGKEIKNKDEILALLKALFLPKRLSIIHCPGHQKG
HSAEARGNRMADQAARKAAITETPDTSTLLIENSSPSGGSSGGSSGSETPGTSESATPESS
GGSSGGSSGSASNFTQFVLVDNGGTGDVTVAPSNFANGVAEWISSNSRSQAYKVTCS
VRQSSAQNRKYTIKVEVPKVATQTVGGEELPVAGWRSYLNMELTIPIFATNSDCELIV
KAMQGLLKDGNPIPSAIAANSGIYSGGSKRTADGSEFEPKKKRKV

### Example 20. Split-Intein Delivery of Prime Editors

[1725] This Example demonstrates that a prime editor may be split using inteins as a means to deliver the prime editor to cells via separate vectors, wherein each vector encodes a portion of the prime editor fusion protein. This Example is focused on a PE fusion protein comprising the canonical SpCas9 (SEQ ID NO: 18). The split sites for other Cas9 proteins may be the corresponding same site, or may need to be optimized for each different Cas9 protein. In the instant Example, the prime editor was split between residues 1023 and 1024 of SpCas9 (SEQ ID NO: 18). This is referred to as the “1023/1024” split site.

[1726] Prime editors (PEs) exceed the AAV packaging capacity. It was therefore contemplated to split the PE by inserting a trans-splicing Npu intein at S. pyogenes Cas9 residue 1024 in SEQ ID NO: 18, allowing delivery of split-SpPEs as two separate polypeptides, each encoded by one of a dual-AAV system. The split site 1023/1024 was chosen because it (1) allows packaging into two AAVs while accommodating space for guide cassette(s) and minimal regulatory elements, (2) mutation of the native Serine to Cysteine would be relatively conservative, (3) the site is a flexible loop near the periphery of Cas9 which sterically is predicted to allow for spicing to occur, and (4) Cas9 has been successfully altered in this loop by circular permutation (but not previously at this specific split site).

[1727] To determine whether Npu-split prime editors are active, HEK cells were transfected with plasmids encoding split-editors, finding they recapitulate activity of full-length PE3 as analyzed by high-throughput sequencing. Furthermore, the three native Npu amino-terminal residues of C-terminal extein are known to splice most efficiently but differ from those natively flanking Cas9 residue 1024. Replacement of these Cas9 residues with the native Npu residues may alter the activity of prime editor. It was therefore determined whether mutation from the Cas9-native “SEQ” towards the Npu intein “CFN” sequence altered efficiency of prime editing. The “SEQ” residues facilitate prime editing with similar efficiency to full-length, suggesting the intein-split PE halves are able to associate and mediate prime editing. No further increase was seen by mutation towards “CFN”, suggesting that association alone may be sufficient for split-PE activity, as we have previously observed with intein-split base editors.

[1728] Although associated, unspliced editors may be active, perturbations of the sterics of the prime editor resulting from incomplete splicing during initiation steps may affect editing outcomes. 1024-CFN was therefore chosen for further studies as it also recapitulates full-length PE3 activity.

[1729] The following are the amino acid sequences of the 1023/1024 split.

[1730] Prime Editor Packages in a Dual AAV System

[1731] Prime editors split between residues 1023 and 1024 with Npu trans-splicing intein become packages within AAV with high titer comparable to that of base editors of similar genome size produced in the same manner.

### Prime Editing In Vivo

[1732] Split SpPE3 delivered with AAV9 by intracerebroventricular injection to P0 mice mediates prime editing in brain tissue in vivo. A nucleotide substitution at position +5 (i.e., 5 nucleotide bases downstream of nick site and within the PAM sequence) of a G-to-T results in the installation of a Pro>Gln coding mutation near the N terminus of DNMT1. This edit demonstrates the viability of prime editing in vivo and is not thought to introduce any selective pressure on edited cells (with “+5” referring to the +5 position downstream of the nick site). The AAV architectures tested include a full-length MMLV RT as well as a truncated variant lacking the RNAse H domain. The truncated post-transcriptional regulatory element W3 was also assessed as it has been shown to increase expression from viral cassettes in vivo but its importance had not been tested in the context of base editors or prime editors. It was found that full-length RT outperforms truncated RT, and the addition of the W3 sequence improves activity. The increase in editing activity when W3 is present indicates that expression of prime editor is limiting in vivo and demonstrates the distinct challenges of prime editing in vivo versus cell culture.

### References

[1733] Oakes, B. L., Fellmann, C. et al. CRISPR-Cas9 Circular Permutants as Programmable Scaffolds for Genome Modification. Cell. 2019 Jan. 10; 176(1-2):254-267.e16. doi: 10.1016/j.cell.2018.11.052.

### Example 21. Linker Optimization in PE2 Format

[1734] This Example constructed a number of variant prime editors all based on PE2. PE2 has the following sequence and structure:

[1735] As used herein, “PE2” refers to a PE complex comprising a fusion protein comprising Cas9(H840A) and a variant MMLV RT having the following structure: [NLS]-[Cas9(H840A)]-[linker]-[MMLV_RT(D200N)(T330P)(L603W)(T306K)(W313F)]+a desired PEgRNA, wherein the PE fusion has the amino acid sequence of SEQ ID NO: 134, which is shown as follows:

(SEQ ID NO: 134)
MKRTADGSEFESPKKKRKVDKKYSIGLDIGTNSVGWAVITDEYKVPSKKFKVLGN
TDRHSIKKNLIGALLFDSGETAEATRLKRTARRRYTRRKNRICYLQEIFSNEMAK
VDDSFFHRLEESFLVEEDKKHERHPIFGNIVDEVAYHEKYPTIYHLRKKLVDSTD
KADLRLIYLALAHMIKFRGHFLIEGDLNPDNSDVDKLFIQLVQTYNQLFEENPIN
ASGVDAKAILSARLSKSRRLENLIAQLPGEKKNGLFGNLIALSLGLTPNFKSNFD
LAEDAKLQLSKDTYDDDLDNLLAQIGDQYADLFLAAKNLSDAILLSDILRVNTEI
TKAPLSASMIKRYDEHHQDLTLLKALVRQQLPEKYKEIFFDQSKNGYAGYIDGG
ASQEEFYKFIKPILEKMDGTEELLVKLNREDLLRKQRTFDNGSIPHQIHLGELHA
ILRRQEDFYPFLKDNREKIEKILTFRIPYYVGPLARGNSRFAWMTRKSEETITPW
NFEEVVDKGASAQSFIERMTNFDKNLPNEKVLPKHSLLYEYFTVYNELTKVKYV
TEGMRKPAFLSGEQKKAIVDLLFKTNRKVTVKQLKEDYFKKIECFDSVEISGVE
DRFNASLGTYHDLLKIIKDKDFLDNEENEDILEDIVLTLTLFEDREMIEERLKTYA
HLFDDKVMKQLKRRRYTGWGRLSRKLINGIRDKQSGKTILDFLKSDGFANRNF
MQLIHDDSLTFKEDIQKAQVSGQGDSLHEHIANLAGSPAIKKGILQTVKVVDELV
KVMGRHKPENIVIEMARENQTTQKGQKNSRERMKRIEEGIKELGSQILKEHPV
ENTQLQNEKLYLYYLQNGRDMYVDQELDINRLSDYDVDAIVPQSFLKDDSIDNK
VLTRSDKNRGKSDNVPSEEVVKKMKNYWRQLLNAKLITQRKFDNLTKAERGGL
SELDKAGFIKRQLVETRQITKHVAQILDSRMNTKYDENDKLIREVKVITLKSKLV
SDFRKDFQFYKVREINNYHHAHDAYLNAVVGTALIKKYPKLESEFVYGDYKVYD
VRKMIAKSEQEIGKATAKYFFYSNIMNFFKTEITLANGEIRKRPLIETNGETGEIV
WDKGRDFATVRKVLSMPQVNIVKKTEVQTGGFSKESILPKRNSDKLIARKKDW
DPKKYGGFDSPTVAYSVLVVAKVEKGKSKKLKSVKELLGITIMERSSFEKNPIDF
LEAKGYKEVKKDLIIKLPKYSLFELENGRICRMLASAGELQKGNELALPSKYVNF
LYLASHYEKLKGSPEDNEQKQLFVEQHKHYLDEIIEQISEFSKRVILADANLDKV
LSAYNKHRDKPIREQAENIIHLFTLTNLGAPAAFKYFDTTIDRKRYTSTKEVLDAT
LIHQSITGLYETRIDLSQLGGDSGGSSGGSSGSETPGTSESATPESSGGSSGGSSTL
NIEDEYRLHETSKEPDVSLGSTWLSDFPQAWAETGGMGLAVRQAPLIIPLKATSTPVSIKQY
PMSQEARLGIKPHIQRLLDQGILVPCQSPWNTPLLPVKKPGTNDYRPVQDLREVNKRVED
IHPTVPNPYNLLSGLPPSHQWYTVLDLKDAFFCLRLHPTSQPLFAFEWRDPEMGISGQLT
WTRLPQGFKNSPTLFNEALHRDLADFRIQHPDLILLQYVDDLLLAATSELDCQQGTRALL
QTLGNLGYRASAKKAQICQKQVKYLGYLLKEGQRWLTEARKETVMGQPTPKTPRQLREF
LGKAGFCRLFIPGFAEMAAPLYPLTKPGTLFNWGPDQQKAYQEIKQALLTAPALGLPDLTK
PFELFVDEKQGYAKGVLTQKLGPWRRPVAYLSKKLDPVAAGWPPCLRMVAAIAVLTKDAG
KLTMGQPLVILAPHAVEALVKQPPDRWLSNARMTHYQALLLDTDRVQFGPVVALNPATLL
PLPEEGLQHNCLDILAEAHGTRPDLTDQPLPDADHTWYTDGSSLLQEGQRKAGAAVTTET
EVIWAKALPAGTSAQRAELIALTQALKMAEGKKLNVYTDSRYAFATAHIHGEIYRRRGWLTS
EGKEIKNKDEILALLKALFLPKRLSIIHCPGHQKGHSAEARGNRMADQAARKAAITETPDT
STLLIENSSPSGGSKRTADGSEFEPKKKRKV
KEY:
NUCLEAR LOCALIZATION SEQUENCE (NLS) TOP: (SEQ ID NO: 124),
BOTTOM: (SEQ ID NO: 133)
CAS9(H840A) (SEQ ID NO: 137)
33-AMINO ACID LINKER (SEQ ID NO: 127)
M-MLV reverse transcriptase (SEQ ID NO: 139).
The PE2 linker is SGGSSGGSSGSETPGTSESATPESSGGSSGGSS
(SEQ ID NO: 127).

[1736] In this experiment, the linker of PE2 was replaced with one of the following substitute linkers (or no linker in one instance):

| Linker | | |
|---|---|---|
| Name | Nucleotide Sequence | Amino Acid Sequence |
| 1x SGGS | TCCGGAGGATCT (SEQ ID NO: 3880) | SGGS (SEQ ID NO: 174) |
| 2x SGGS | TCCGGAGGATCTAGCGGAGGCTCC | SGGSSGGS (SEQ ID NO: 446) |
| | (SEQ ID NO: 3881) | |
| 3x SGGS | TCCGGAGGATCTAGCGGAGGCTCCA | SGGSSGGSSGGS (SEQ ID NO: |
| | GCGGAGGCAGC (SEQ ID NO: 3882) | 3889) |
| 1x XTEN | TCTGGCTCTGAGACACCTGGCACAAG | SGSETPGTSESATPES (SEQ ID |
| | CGAGAGCGCAACACCTGAAAGC | NO: 171) |
| | (SEQ ID NO: 3883) | |
| No linker | | |
| 1x Gly | GGT | G |
| 1x Pro | CCC | P |
| 1x | GAAGCAGCTGCTAAA (SEQ ID NO: | EAAAK (SEQ ID NO: 3968) |
| EAAAK | 3884) | |
| 2x | GAAGCCGCTGCTAAAGAAGCTGCAG | EAAAKEAAAK (SEQ ID NO: |
| EAAAK | CTAAG (SEQ ID NO: 3885) | 3969) |
| 3x | GAAGCCGCTGCTAAAGAGGCCGCTG | EAAAKEAAAKEAAAK (SEQ ID |
| EAAAK | CTAAAGAAGCTGCAGCTAAG (SEQ ID | NO: 3970) |
| | NO: 3886) | |

[1737] FIG. 79 shows the editing efficiency of the replacement linker constructs. In particular, the data shows the editing efficiency of the PE2 construct with the current linker (noted as PE2—white box) compared to various versions with the linker replaced with a sequence as indicated at the HEK3, EMX1, FANCF, RNF2 loci for representative PEgRNAs for transition, transversion, insertion, and deletion edits. The replacement linkers are referred to as “1×SGGS” (SEQ ID NO: 174), “2×SGGS” (SEQ ID NO: 446), “3×SGGS” (SEQ ID NO: 3889), “1×XTEN” (SEQ ID NO: 171), “no linker”, “1×Gly”, “1×Pro”, “1×EAAAK” (SEQ ID NO: 3968), “2×EAAAK” (SEQ ID NO: 3969). and “3×EAAAK” (SEQ ID NO: 3970). The editing efficiency is measured in bar graph format relative to the “control” editing efficienty of PE2. The linker of PE2 is SGGSSGGSSGSETPGTSESATPESSGGSSGGSS (SEQ ID NO: 127). All editing was done in the context of the PE3 system, i.e., which refers the PE2 editing construct plus the addition of the optimal secondary sgRNA nicking guide.

[1738] FIG. 80. shows that the 1×XTEN (SEQ ID NO: 171) linker provided an increase in editing efficiency. Taking the average fold efficacy relative to PE2 yields the graph shown, indicating that use of a 1×XTEN (SEQ ID NO: 171) linker sequence improves editing efficiency by 1.14 fold on average (n=15).

### Example 22. Prime Editor Guide RNAs with Improved Activities

[1739] In various embodiments, PEgRNA are likely to be target DNA site and edit dependent. That is, the sequence of the PEgRNA will depend upon the target DNA sequence and the particular edit that is being introduced therein by prime editing (e.g., deletion, insertion, inversion, substitution). For instance, in certain embodiments, when attaching a motif 3′ of the primer binding site (PBS) of the PEgRNA, a linker between the PBS and motif is preferred to prevent steric clash with the polymerase domain (e.g., reverse transcriptase) of the PE fusion protein. However, the nature of that linker may be different for each site. For instance, if the same linker for each site were used, it could artificially render a 13 nt PBS a 16 nt PBS by fortuitous pairing to the spacer sequence. Similarly, the linker could basepair to the PBS itself, resulting in its occlusion and potentially reducing activity. So, unlike with protein-based editors, such as PE or BE4, a single linker sequence option connecting two elements may not be effective in each construct but will depend in part on the sequence of the target DNA sequence and the edit of interest.

[1740] Building, in part, on the information presented Example 15 (Design and Engineering of PEgRNAs), this Example constructed and then tested the effects of various structural modifications made to PEgRNA on editing function, among other aspects.

Expression of PEgRNAs from Non-Pol III Promoters

[1741] A variety of PEgRNA expression systems were tested for their ability to generate PEgRNAs, using insertion of a 102 nucleotide sequence from FKBP as a readout.

[1742] Transcription of PEgRNA can be directed by a typical constitutive promoter, such as U6 promoter. Although the U6 promoter is in most cases effective at directing transcription of PEgRNAs, the U6 promoter is not very effective at directing the transcription of longer PEgRNAs or U-rich RNAs. U-rich RNA stretches of cause premature termination of transcription. This Example compared editing outcomes of guides expressed from the CMV promoter or U1 promoter with the U6 promoter. These promoters require a different terminator sequence, such as MASC ENE or PAN ENE, as provided below. An increase in editing was observed with the pCMV/MASC-ENE system, however these guides resulted in incomplete insertion of the sequence, while, with the U6 promoter, complete insertion was observed at lower levels of editing. See FIG. 81. The data suggests the likelihood that the alternate expression systems may be useful for long insertions.

[1743] The nucleotide sequence of the pCMV/MASC-ENE expression systems as follows (5′-to-3′ direction) (with the name of the motif in bold immediately preceding the region to which it refers):

(SEQ ID NO: 3971)
-pCMV promoter-
TAGTTATTAATAGTAATCAATTACGGGGTCATTAGTTCATAGCCCATATATGGAG
TTCCGCGTTACATAACTTACGGTAAATGGCCCGCCTGGCTGACCGCCCAACGACC
CCCGCCCATTGACGTCAATAATGACGTATGTTCCCATAGTAACGCCAATAGGGAC
TTTCCATTGACGTCAATGGGTGGAGTATTTACGGTAAACTGCCCACTTGGCAGTA
CATCAAGTGTATCATATGCCAAGTACGCCCCCTATTGACGTCAATGACGGTAAAT
GGCCCGCCTGGCATTATGCCCAGTACATGACCTTATGGGACTTTCCTACTTGGCA
GTACATCTACGTATTAGTCATCGCTATTACCATGGTGATGCGGTTTTGGCAGTAC
ATCAATGGGCGTGGATAGCGGTTTGACTCACGGGGATTTCCAAGTCTCCACCCCA
TTGACGTCAATGGGAGTTTGTTTTGGCACCAAAATCAACGGGACTTTCCAAAATG
TCGTAACAACTCCGCCCCATTGACGCAAATGGGCGGTAGGCGTGTACGGTGGGA
GGTCTATATAAGCAGAGCTGGTTTAGTGAACCGTCAGATC-Csy4 loop-
GTTCACTGCCGTATAGGCAG-spacer-GGCCCAGACTGAGCACGTGA-scaffold-
GTTTTAGAGCTAGAAATAGCAAGTTAAAATAAGGCTAGTCCGTTATCAACTTGAA
AAAGTGGGACCGAGTCGGTCC-template-
TGGAGGAAGCAGGGCTTCCTTTCCTCTGCCATCA-insert-
AAATTTCTTTCCATCTTCAAGCATCCCGGTGTAGTGCACCACGCAGGTCTGGCCG
CGCTTGGGGAAGGTGCGCCCGTCTCCTGGGGAGATGGTTTCCACCTGCACTCC-
PBS-CGTGCTCAGTCTG-linker-TTT-MASC ENE-
TAGGGTCATGAAGGTTTTTCTTTTCCTGAGAAAACAACACGTATTGTTTTCTCAGG
TTTTGCTTTTTGGCCTTTTTCTAGCTTAAAAAAAAAAAAAGCAAAAGATGCTGGT
GGTTGGCACTCCTGGTTTCCAGGACGGGGTTCAAATCCCTGCGGCGTCTTTGCTTT
GACT-unrelated plasmid sequence-
TTTTTTTAAGCTTGGGCCGCTCGAGGTAGCAGC-Ubc promoter-
GGCCTCCGCGCCGGGTTTTGGCGCCTCCCGCGGGCGCCCCCCTCCTCACGGCGAG
CGCTGCCACGTCAGACGAAGGGCGCAGGAGCGTTCCTGATCCTTCCGCCCGGAC
GCTCAGGACAGCGGCCCGCTGCTCATAAGACTCGGCCTTAGAACCCCAGTATCA
GCAGAAGGACATTTTAGGACGGGACTTGGGTGACTCTAGGGCACTGGTTTTCTTT
CCAGAGAGCGGAACAGGCGAGGAAAAGTAGTCCCTTCTCGGCGATTCTGCGGAG
GGATCTCCGTGGGGCGGTGAACGCCGATGATTATATAAGGACGCGCCGGGTGTG
GCACAGCTAGTTCCGTCGCAGCCGGGATTTGGGTCGCGGTTCTTGTTTGTGGATC
GCTGTGATCGTCACTTGGTGAGTTGCGGGCTGCTGGGCTGGCCGGGGCTTTCGTG
GCCGCCGGGCCGCTCGGTGGGACGGAAGCGTGTGGAGAGACCGCCAAGGGCTGT
AGTCTGGGTCCGCGAGCAAGGTTGCCCTGAACTGGGGGTTGGGGGGAGCGCACA
AAATGGCGGCTGTTCCCGAGTCTTGAATGGAAGACGCTTGTAAGGCGGGCTGTG
AGGTCGTTGAAACAAGGTGGGGGGCATGGTGGGCGGCAAGAACCCAAGGTCTTG
AGGCCTTCGCTAATGCGGGAAAGCTCTTATTCGGGTGAGATGGGCTGGGGCACC
ATCTGGGGACCCTGACGTGAAGTTTGTCACTGACTGGAGAACTCGGGTTTGTCGT
CTGGTTGCGGGGGCGGCAGTTATGCGGTGCCGTTGGGCAGTGCACCCGTACCTTT
GGGAGCGCGCGCCTCGTCGTGTCGTGACGTCACCCGTTCTGTTGGCTTATAATGC
AGGGTGGGGCCACCTGCCGGTAGGTGTGCGGTAGGCTTTTCTCCGTCGCAGGACG
CAGGGTTCGGGCCTAGGGTAGGCTCTCCTGAATCGACAGGCGCCGGACCTCTGGT
GAGGGGAGGGATAAGTGAGGCGTCAGTTTCTTTGGTCGGTTTTATGTACCTATCT
TCTTAAGTAGCTGAAGCTCCGGTTTTGAACTATGCGCTCGGGGTTGGCGAGTGTG
TTTTGTGAAGTTTTTTAGGCACCTTTTGAAATGTAATCATTTGGGTCAATATGTAA
TTTTCAGTGTTAGACTAGTAAATTGTCCGCTAAATTCTGGCCGTTTTTGGCTTTTT
TGTTAGACAGGATCCCCGGGTACCGGTCGCCACC-Csy4 and NLS-
ATGGGCTCTTTTACTATGGACCACTACCTGGATATTAGACTGAGACCTGACCCTG
AGTTCCCACCCGCCCAGCTGATGAGCGTGCTGTTCGGCAAGCTGCACCAGGCCCT
GGTGGCACAGGGAGGCGACCGGATCGGCGTGAGCTTCCCCGACCTGGATGAGAG
CAGATCCAGGCTGGGAGAGCGCCTGAGGATCCACGCATCCGCCGACGATCTGCG
CGCCCTGCTGGCCCGGCCATGGCTGGAGGGCCTGCGCGACCACCTGCAGTTTGG
AGAGCCAGCAGTGGTGCCACACCCTACCCCATACAGGCAGGTGTCCAGGGTGCA
GGCAAAGTCTAACCCTGAGCGGCTGCGGAGAAGGCTGATGCGCCGGCACGATCT
GTCTGAGGAGGAGGCCAGAAAGAGGATCCCCGACACCGTGGCCAGAACACTGG
ATCTGCCTTTCGTGACCCTGCGGAGCCAGAGCACAGGCCAGCACTTCAGACTGTT
TATCAGGCACGGCCCACTGCAGGTGACAGCCGAGGAAGGAGGATTCACTTGTTA
CGGACTGTCTAAAGGAGGATTCGTGCCCTGGTTCAGCAGCCTGAGGCCTCCTAAG
AAGAAGAGGAAGGTTTAA-SV40 terminator-
TGATCATAATCAAGCCATATCACATCTGTAGAGGTTTACTTGCTTTAAAAAACCT
CCACACCTCCCCCTGAACCTGAAACATAAAATGAATGCAATTGTTGTTGTTAACT
TGTTTATTGCAGCTTATAATGGTTACAAATAAAGCAATAGCATCACAAATTTCAC
AAATAAAGCATTTTTTTCACTGCATTCTAGTTGTGGTTTGTCCAAACTCATCAATG
TATCTTATCATGTCTGGATCTGC
Key:
[pCMV promoter] - binds pol II RNA polymerase
[Csy4 loop] - bound by Csy4 protein, results in
cleavage 3′ of the loop. Required because part of
[CMV promoter] is transcribed, and if this sequence
is attached 5′ of the gRNA it will lower/eliminate
activity (previously known).
[Spacer sequence] of pegRNA
[pegRNA scaffold]
[DNA synthesis template]
[insertion edit (108 nt from FKBP)]
[primer binding site]
[Linker]°(highly variable) - connects PBS and
terminator element
[MASC ENE transcription terminator] - transcription
of this element results in termination of transcription;
a polyA tail is encoded and then sequestered by the ENE
element
[Unimportant sequence]
[Ubc promoter] - required for expression of the Csy4 protein
[Csy4 protein and NLS] - required for processing of
the 5′ end of the guide. Other strategies could also
be used that don't require expression of a large protein
(such as ribozyme-mediated cleavage of the spacer), but
these would require more individual tuning for different
spacer sequences, so we used this.
[SV40 terminator] - for termination of the Csy4 protein.

### Improvements to the PEgRNA Scaffold

[1744] A number of structural modifications to the gRNA scaffold were also tested, none of which showed a significant increase in editing activity (see FIG. 82 at 3.30.13 through 3.30.19 in the X axis, as compare to 3.30). However, this data has two caveats worth noting. First, this guide already worked quite well, and a less effective guide would have been better to test. Second, in HEK cells, transfection is quite efficient, and it was noted that the amount of guide RNA transfected is in large excess compared to what is needed (reducing the amount by ˜4-8 fold has no effect on editing). These improvements might only be seen in other cell types, where transfection efficiency is lower, or with less effective guides. Many of these changes are precedented to improve sgRNA activity in other cell lines.

[1745] The sequences of the constructs of FIG. 82 are as follows:

HEK3.30 pegRNA sequence:
[SEQ ID NO: 3972]
spacer-GGCCCAGACUGAGCACGUGA-scaffold-
GUUUUAGAGCUAGAAAUAGCAAGUUAAAAUAAGGCUAGUCCGUUAUCAACU
UGAAAAAGUGGCACCGAGUCGGUGC-Templateand PBS-
UCUGCCAUCAAAGCGUGCUCAGUCUG-Terminal motif-UUUU
HEK3.30.0 pegRNA sequence:
[SEQ ID NO: 3874]
spacer-GGCCCAGACUGAGCACGUGA-scaffold-
GUUUUAGAGCUAGAAAUAGCAAGUUAAAAUAAGGCUAGUCCGUUAUCAACU
UGAAAAAGUGGCACCGAGUCGGUGC-Template and PBS-
UCUGCCAUCAAAGCGUGCUCAGUCUG-Terminal motif-UUUUUU
HEK3.30.1 pegRNA sequence:
[SEQ ID NO: 3973]
spacer-GGCCCAGACUGAGCACGUGA-scaffold-
GUUUUAGAGCUAGAAAUAGCAAGUUAAAAUAAGGCUAGUCCGUUAUCAACU
UGAAAAAGUGGCACCGAGUCGGUGC-Template and PBS-
UCUGCCAUCAAAGCGUGCUCAGUCUG-Terminal motif-[none]
HEK3.30.2 pegRNA sequence:
[SEQ ID NO: 3974]
spacer-GGCCCAGACUGAGCACGUGA-scaffold-
GUUUUAGAGCUAGAAAUAGCAAGUUAAAAUAAGGCUAGUCCGUUAUCAACU
UGAAAAAGUGGCACCGAGUCGGUGC-Template and PBS-
UCUGCCAUCAAAGCGUGCUCAGUCUG-Terminal motif-
UUUGCUCGAGGCGGAAACGCCUCGAGCUUUU
HEK3.30.2b pegRNA sequence:
[SEQ ID NO: 3975]
spacer-GGCCCAGACUGAGCACGUGA-scaffold-
GUUUUAGAGCUAGAAAUAGCAAGUUAAAAUAAGGCUAGUCCGUUAUCAACU
UGAAAAAGUGGCACCGAGUCGGUGC-Template and PBS-
UCUGCCAUCAAAGCGUGCUCAGUCUG-Terminal motif-
UUUGCUCGAGGCGGAAACGCCUCGAGC
HEK3.30.3 pegRNA sequence:
[SEQ ID NO: 3976]
spacer-GGCCCAGACUGAGCACGUGA-scaffold-
GUUUUAGAGCUAGAAAUAGCAAGUUAAAAUAAGGCUAGUCCGUUAUCAACU
UGAAAAAGUGGCACCGAGUCGGUGC-Template and PBS-
UCUGCCAUCAAAGCGUGCUCAGUCUG-Terminal motif-
UUUGCUCGAGGCGUACGCGAAAGCGUACGCCUCGAGCUUUU
HEK3.30.3b pegRNA sequence:
[SEQ ID NO: 3977]
spacer-GGCCCAGACUGAGCACGUGA-scaffold-
GUUUUAGAGCUAGAAAUAGCAAGUUAAAAUAAGGCUAGUCCGUUAUCAACU
UGAAAAAGUGGCACCGAGUCGGUGC-Template and PBS-
UCUGCCAUCAAAGCGUGCUCAGUCUG-Terminal motif-
UUUGCUCGAGGCGUACGCGAAAGCGUACGCCUCGAGC
HEK3.30.5 pegRNA sequence:
[SEQ ID NO: 3978]
spacer-GGCCCAGACUGAGCACGUGA-scaffold-
GUUUUAGAGCUAGAAAUAGCAAGUUAAAAUAAGGCUAGUCCGUUAUCAACU
UGAAAAAGUGGCACCGAGUCGGUGC-Template and PBS-
UCUGCCAUCAAAGCGUGCUCAGUCUG-Terminal motif-
UUUGCUCGAGGCGUACGCCCGAUGAAAAUCGGGCGUACGCCUCGAGCUUUU
HEK3.30.5a pegRNA sequence:
[SEQ ID NO: 3979]
spacer-GGCCCAGACUGAGCACGUGA-scaffold-
GUUUUAGAGCUAGAAAUAGCAAGUUAAAAUAAGGCUAGUCCGUUAUCAACU
UGAAAAAGUGGCACCGAGUCGGUGC-Template and PBS-
UCUGCCAUCAAAGCGUGCUCAGUCUG-Terminal motif-
UUUUGGGGUUGGGGUUGGGGUUGGGGUUUU
HEK3.30.5b pegRNA sequence:
[SEQ ID NO: 3980]
spacer-GGCCCAGACUGAGCACGUGA-scaffold-
GUUUUAGAGCUAGAAAUAGCAAGUUAAAAUAAGGCUAGUCCGUUAUCAACU
UGAAAAAGUGGCACCGAGUCGGUGC-Template and PBS-
UCUGCCAUCAAAGCGUGCUCAGUCUG-Terminal motif-
UUUGGUGGUGGUGGUUUU
HEK3.30.13 pegRNA sequence:
[SEQ ID NO: 3981]
spacer-GGCCCAGACUGAGCACGUGA-scaffold-
GUUUUAGAGCUAGCGAAAGCUAGCAAGUUAAAAUAAGGCUAGUCCGUUAUC
AACUUGAAAAAGUGGGACCGAGUCGGUCC-Template and PBS-
UCUGCCAUCAAAGCGUGCUCAGUCUG-Terminal motif-UUUU
HEK3.30.15 pegRNA sequence:
[SEQ ID NO: 3982]
spacer-GGCCCAGACUGAGCACGUGA-scaffold-
GUUUUAGAGCUAGCUCGAAAGAGCUAGCAAGUUAAAAUAAGGCUAGUCCGU
UAUCAACUUGAAAAAGUGGGACCGAGUCGGUCC-Template and PBS-
UCUGCCAUCAAAGCGUGCUCAGUCUG-Terminal motif-UUUU
HEK3.30.15 pegRNA sequence:
[SEQ ID NO: 3983]
spacer-GGCCCAGACUGAGCACGUGA-scaffold-
GUUUUAGAGCUAGCUCAUGAAAAUGAGCUAGCAAGUUAAAAUAAGGCUAGU
CCGUUAUCAACUUGAAAAAGUGGGACCGAGUCGGUCC-Template and PBS-
UCUGCCAUCAAAGCGUGCUCAGUCUG-Terminal motif-UUUU
HEK3.30.16 pegRNA sequence:
[SEQ ID NO: 3984]
spacer-GGCCCAGACUGAGCACGUGA-scaffold-
GUUUUAGAGCUAGCUCAUCCGAAAGGAUGAGCUAGCAAGUUAAAAUAAGGC
UAGUCCGUUAUCAACUUGAAAAAGUGGGACCGAGUCGGUCC-Template and
PBS-UCUGCCAUCAAAGCGUGCUCAGUCUG-Terminal motif-UUUU
HEK3.30.17 pegRNA sequence:
[SEQ ID NO: 3985]
spacer-GGCCCAGACUGAGCACGUGA-scaffold-
GUUUUAGAGCUAGCUCAUCCUGGAAACAGGAUGAGCUAGCAAGUUAAAAUA
AGGCUAGUCCGUUAUCAACUUGAAAAAGUGGGACCGAGUCGGUCC-Template
and PBS-UCUGCCAUCAAAGCGUGCUCAGUCUG-Terminal motif-UUUU
HEK3.30.18 pegRNA sequence:
[SEQ ID NO: 3986]
spacer-GGCCCAGACUGAGCACGUGA-scaffold-
GUUUGAGAGCUAGAAAUAGCAAGUUUAAAUAAGGCUAGUCCGUUAUCAACU
UGAAAAAGUGGGACCGAGUCGGUCC-Template and PBS-
UCUGCCAUCAAAGCGUGCUCAGUCUG-Terminal motif-UUUU
HEK3.30.19 pegRNA sequence:
[SEQ ID NO: 3987]
spacer-GGCCCAGACUGAGCACGUGA-scaffold-
GUUUGAGAGCUAGCUCAUGAAAAUGAGCUAGCAAGUUUAAAUAAGGCUAGU
CCGUUAUCAACUUGAAAAAGUGGGACCGAGUCGGUCC-Template and PBS-
UCUGCCAUCAAAGCGUGCUCAGUCUG-Terminal motif-UUUU
HEK3.56 pegRNA sequence:
[SEQ ID NO: 3890]
spacer-GGCCCAGACUGAGCACGUGA-scaffold-
GUUUUAGAGCUAGAAAUAGCAAGUUAAAAUAAGGCUAGUCCGUUAUCAACU
UGAAAAAGUGGCACCGAGUCGGUGC-Template and PBS-
UCUGCCAUCAAAGCUUCGACCGUGCUCAGUCUG-Terminal motif-UUUU
HEK3.56.1a pegRNA sequence:
[SEQ ID NO: 3891]
spacer-GGCCCAGACUGAGCACGUGA-scaffold-
GUUUUAGAGCUAGAAAUAGCAAGUUAAAAUAAGGCUAGUCCGUUAUCAACU
UGAAAAAGUGGCACCGAGUCGGUGC-Template and PBS-
UCUGCCAUCAGGCGAAAGCCUCGUGCUCAGUCUG-Terminal motif-UUUU
HEK3.56.1b pegRNA sequence:
[SEQ ID NO: 3988]
spacer-GGCCCAGACUGAGCACGUGA-scaffold-
GUUUUAGAGCUAGAAAUAGCAAGUUAAAAUAAGGCUAGUCCGUUAUCAACU
UGAAAAAGUGGCACCGAGUCGGUGC-Template and PBS-
UCUGCCAUCAGACGAAAGCCUCGUGCUCAGUCUG-Terminal motif-UUUU
HEK3.56.1c pegRNA sequence:
[SEQ ID NO: 3892]
spacer-GGCCCAGACUGAGCACGUGA-scaffold-
GUUUUAGAGCUAGAAAUAGCAAGUUAAAAUAAGGCUAGUCCGUUAUCAACU
UGAAAAAGUGGCACCGAGUCGGUGC-Template and PBS-
UCUGCCAUCAGGCGAAAGCCCGUGCUCAGUCUG-Terminal motif-UUUU
HEK3.56.2a pegRNA sequence:
[SEQ ID NO: 3893]
spacer-GGCCCAGACUGAGCACGUGA-scaffold-
GUUUUAGAGCUAGAAAUAGCAAGUUAAAAUAAGGCUAGUCCGUUAUCAACU
UGAAAAAGUGGCACCGAGUCGGUGC-Template and PBS-
UCUGCCAUCAGAUGCGAAAGCAUCUCGUGCUCAGUCUG-Terminal motif-UUUU
HEK3.56.2b pegRNA sequence:
[SEQ ID NO: 3894]
spacer-GGCCCAGACUGAGCACGUGA-scaffold-
GUUUUAGAGCUAGAAAUAGCAAGUUAAAAUAAGGCUAGUCCGUUAUCAACU
UGAAAAAGUGGCACCGAGUCGGUGC-Template and PBS-
UCUGCCAUCAGAUGCGAAAGCACCUCGUGCUCAGUCUG-Terminal motif-UUUU
HEK3.56.2c pegRNA sequence:
[SEQ ID NO: 3895]
spacer-GGCCCAGACUGAGCACGUGA-scaffold-
GUUUUAGAGCUAGAAAUAGCAAGUUAAAAUAAGGCUAGUCCGUUAUCAACU
UGAAAAAGUGGCACCGAGUCGGUGC-Template and PBS-
UCUGCCAUCAGAUGCGAAAGCAUCCGUGCUCAGUCUG-Terminal motif-UUUU
HEK3.56.3a pegRNA sequence:
[SEQ ID NO: 3896]
spacer-GGCCCAGACUGAGCACGUGA-scaffold-
GUUUUAGAGCUAGAAAUAGCAAGUUAAAAUAAGGCUAGUCCGUUAUCAACU
UGAAAAAGUGGCACCGAGUCGGUGC-Template and PBS-
UCUGCCAUCAGACAUGCGAAAGCAUGUCUCGUGCUCAGUCUG-Terminal motif-
UUUU
HEK3.56.3b pegRNA sequence:
[SEQ ID NO: 3897]
spacer-GGCCCAGACUGAGCACGUGA-scaffold-
GUUUUAGAGCUAGAAAUAGCAAGUUAAAAUAAGGCUAGUCCGUUAUCAACU
UGAAAAAGUGGCACCGAGUCGGUGC-Template and PBS-
UCUGCCAUCAGACAUGCGAAAGCAGGCCCGUGCUCAGUCUG-Terminal motif-
UUUU
HEK3.56.3c pegRNA sequence:
[SEQ ID NO: 3898]
spacer-GGCCCAGACUGAGCACGUGA-scaffold-
GUUUUAGAGCUAGAAAUAGCAAGUUAAAAUAAGGCUAGUCCGUUAUCAACU
UGAAAAAGUGGCACCGAGUCGGUGC-Template and PBS-
UCUGCCAUCAGACAUGCGAAAGCAUGUCUCGUGCUCAGUCUG-Terminal motif-
UUUU
HEK3.56.4a pegRNA sequence:
[SEQ ID NO: 3899]
spacer-GGCCCAGACUGAGCACGUGA-scaffold-
GUUUUAGAGCUAUACGUAGCAAGUUAAAAUAAGGCUAGUCCGUUAUCAACU
UUACGAAGUGGGACCGAGUCGGUCC-Template and PBS-
UCUGCCAUCAAAGCUUCGACCGUGCUCAGUCUG-Terminal motif-UUUU
HEK3.56.4b pegRNA sequence:
[SEQ ID NO: 3989]
5′motif-GCAGACCUAAGUGGUGACAUAUGGUCUG-spacer-
GGCCCAGACUGAGCACGUGA-scaffold-
GUUUUAGAGCUAUACGUAGCAAGUUAAAAUAAGGCUAGUCCGUUAUCAACU
UUACGAAGUGGGACCGAGUCGGUCC-Template and PBS--Terminal motif-UUUU
HEK3.56.4c pegRNA sequence:
[SEQ ID NO: 3900]
5′motif-GCAGACCUAAGUGGUGACAUAUGGUCUG-spacer-
GGCCCAGACUGAGCACGUGA-scaffold-
GUUUUAGAGCUAUACGUAGCAAGUUAAAAUAAGGCUAGUCCGUUAUCAACU
UUACGAAGUGGGACCGAGUCGGUCC-Template and PBS--Terminal motif-UUUU
HEK3.56.4d pegRNA sequence:
[SEQ ID NO: 3901]
5′motif-GCAGACCUAAGUGGUGACAUAUGGUCUG-spacer-
GGCCCAGACUGAGCACGUGA-scaffold-
GUUUUAGAGCUAUACGUAGCAAGUUAAAAUAAGGCUAGUCCGUUAUCAACU
UUACGAAGUGGGACCGAGUCGGUCC-Template and PBS--Terminal motif-UUUU

Note that where ever either no terminal motif or a terminal motif that does not end in a run of U's exists, transcript was terminated using the following HDV ribozyme:

[SEQ ID NO: 3990]
GGCCGGCAUGGUCCCAGCCUCCUCGCUGGCGCCGGCUGGGCAACAUGCUUC
GGCAUGGCGAAUGGGAC

### Additional RNA Motifs

[1746] See FIG. 82 for details on certain motifs, such as an HDV ribozyme 3′ of the PEgRNA, or G-quadruplex insertion, P1 extensions, template hairpins, and tetraloop circ'd, that may be introduced into a PEgRNA to improve its performance.

[1747] In particular, this Example tested the effect of installing a tRNA motif 3′ of the primer binding site. This element was chosen because of multiple potential functions:

[1748] (1) the tRNA motif is a very stable RNA motif, and so could potentially reduce PEgRNA degradation;

[1749] (2) the MMLV RT uses a prolyl-tRNA as a primer when converting the viral genome into DNA during transcription, so it was suspected the same cap could be bound by the RT, improving binding of the PEgRNA by PE, RNA stability, and bringing the PBS back in closer proximity to the genomic site, potentially also improving activity.

[1750] In these constructs, the P1 of the tRNA (see FIG. 84) was extended. P1 refers to the first stem/base-pairing element of the tRNA (see FIG. 84). This was believed to be necessary to prevent RNAseP-mediated cleavage of the tRNA 5′ of the P1, which would result in its removal from the PEgRNA.

[1751] In this design a prolyl-tRNA (codon CGG) with an extended P1 and short 3 nt linker between the tRNA and the PBS was used. A variety of tRNA designs were tested and the editing efficiency was tested compared to a PEgRNA having no tRNA cap—see the comparative data in FIG. 83 (depicting a PE experiment that targeted editing of the HEK3 gene, specifically targeting the insertion of a 10 nt insertion at position +1 relative to the nick site and using PE3), FIG. 85 (depicting a PE experiment that targeted editing of the FANCF gene, specifically targeting a G-to-T conversion at position +5 relative to the nick site and using PE3 construct) and FIG. 86 (depicting a PE experiment that targeted editing of the HEK3 gene, specifically targeting the insertion of a 71 nt FLAG tag insertion at position +1 relative to the nick site and using PE3 construct). tRNA-modified PEgRNAs were tested against a non-modified PEgRNA control.

[1752] UGG/CGG refers to the codon used, the number refers to the length of the added P1 extension, long indicates an 8 nt linker, no designation a 3 nt linker.

[1753] The data suggest that the installation of a tRNA may enable use of shorter PBSs, which would likely result in additional activity improvements. In the case of RNF2, it is possible/likely that the linker used resulted in improved PBS binding to the spacer, and the resulting diminishment in activity.

[1754] Some sequences used:

HEK3 +1 FLAG-tag insertion, proly-tRNA[55 UGG[56
P1 ext 5 nt, linker 3 nt
[SEQ ID NO: 3902]
GGCCCAGACUGAGCACGUGAGUUUUAGAGCUAGAAAUAGCAAGUUAAAAUA
AGGCUAGUCCGUUAUCAACUUGAAAAAGUGGCACCGAGUCGGUGCUGGAGG
AAGCAGGGCUUCCUUUCCUCUGCCAUCACUUAUCGUCGUCAUCCUUGUAAU
CCGUGCUCAGUCUGUCUGGCGGGGCUCGUUGGUCUAGGGGUAUGAUUCUCG
CUUCGGGUGCGAGAGGUCCCGGGUUCAAAUCCCGGACGAGCCCCGCCUUUU
FANCF +5 G to T proly-tRNA[55 CGG[56 P1 ext
5 nt, linker 3 nt
[SEQ ID NO: 3903]
GGAAUCCCUUCUGCAGCACCGUUUUAGAGCUAGAAAUAGCAAGUUAAAAUA
AGGCUAGUCCGUUAUCAACUUGAAAAAGUGGCACCGAGUCGGUGCGGAAAA
GCGAUCAAGGUGCUGCAGAAGGGAUCUGGCGGGGCUCGUUGGUCUAGGGGU
AUGAUUCUCGCUUCGGGUGCGAGAGGUCCCGGGUUCAAAUCCCGGACGAGC
CCCGCCUUUU
HEK3 ++1 10 nt insertion, proly-tRNA[55 UGG[56
P1 ext 5 nt, linker 3 nt
[SEQ ID NO: 3904]
GGCCCAGACUGAGCACGUGAGUUUUAGAGCUAGAAAUAGCAAGUUAAAAUA
AGGCUAGUCCGUUAUCAACUUGAAAAAGUGGGACCGAGUCGGUCCUCUGCC
AUCAAAGCUUCGACCGUGCUCAGUCUUCUGCUCGAGGCGGGGCUCGUUGGU
CUAGGGGUAUGAUUCUCGCUUCGGGUGCGAGAGGUCCCGGGUUCAAAUCCC
GGACGAGCCCCGCCUCGAGCUUUU

[1755] The sequences reported in the data of FIGS. 85 and 86 are as follows:

FANCF +5 G to T pegRNA sequence:
[SEQ ID NO: 3905]
space, scaffold template and PBSr-
GGAAUCCCUUCUGCAGCACCGUUUUAGAGCUAGAAAUAGCAAGUUAAAAUA
AGGCUAGUCCGUUAUCAACUUGAAAAAGUGGCACCGAGUCGGUGCGGAAAA
GCGAUCAAGGUGCUGCAGAAGGGA-partial CGG tRNA linker 8-
UCUCUCUCUGGUCUAGGGGUAUGAUUCUCGCUUCGGGUGCGAGAGGUCCCG
GGUUCAAUUUU
FANCF +5 G to T pegRNA sequence:
[SEQ ID NO: 3906]
space, scaffold template and PBSr-
GGAAUCCCUUCUGCAGCACCGUUUUAGAGCUAGAAAUAGCAAGUUAAAAUA
AGGCUAGUCCGUUAUCAACUUGAAAAAGUGGCACCGAGUCGGUGCGGAAAA
GCGAUCAAGGUGCUGCAGAAGGGA-UGG P1 ext 5 linker 3-
UCUGGCGGGGCUCGUUGGUCUAGGGGUAUGAUUCUCGCUUUGGGUGCGAGA
GGUCCCGGGUUCAAAUCCCGGACGAGCCCCGCCUUUU
FANCF +5 G to T pegRNA sequence:
[SEQ ID NO: 3907]
space, scaffold template and PBSr-
GGAAUCCCUUCUGCAGCACCGUUUUAGAGCUAGAAAUAGCAAGUUAAAAUA
AGGCUAGUCCGUUAUCAACUUGAAAAAGUGGCACCGAGUCGGUGCGGAAAA
GCGAUCAAGGUGCUGCAGAAGGGA-UGG P1 ext 5 linker 8-
UCUCUCUCGGCGGGGCUCGUUGGUCUAGGGGUAUGAUUCUCGCUUUGGGUG
CGAGAGGUCCCGGGUUCAAAUCCCGGACGAGCCCCGCCUUUU
FANCF +5 G to T pegRNA sequence:
[SEQ ID NO: 3908]
space, scaffold template and PBSr-
GGAAUCCCUUCUGCAGCACCGUUUUAGAGCUAGAAAUAGCAAGUUAAAAUA
AGGCUAGUCCGUUAUCAACUUGAAAAAGUGGCACCGAGUCGGUGCGGAAAA
GCGAUCAAGGUGCUGCAGAAGGGA-UGG P1 ext 8 linker 3-
UCUCGAGGCGGGGCUCGUUGGUCUAGGGGUAUGAUUCUCGCUUUGGGUGCG
AGAGGUCCCGGGUUCAAAUCCCGGACGAGCCCCGCCUCGUUUU
FANCF +5 G to T pegRNA sequence:
[SEQ ID NO: 3909]
space, scaffold template and PBSr-
GGAAUCCCUUCUGCAGCACCGUUUUAGAGCUAGAAAUAGCAAGUUAAAAUA
AGGCUAGUCCGUUAUCAACUUGAAAAAGUGGCACCGAGUCGGUGCGGAAAA
GCGAUCAAGGUGCUGCAGAAGGGA-UGG P1 ext 8 linker 8-
UCUCUCUCCGAGGCGGGGCUCGUUGGUCUAGGGGUAUGAUUCUCGCUUUGG
GUGCGAGAGGUCCCGGGUUCAAAUCCCGGACGAGCCCCGCCUCGUUUU
FANCF +5 G to T pegRNA sequence:
[SEQ ID NO: 3910]
space, scaffold template and PBSr-
GGAAUCCCUUCUGCAGCACCGUUUUAGAGCUAGAAAUAGCAAGUUAAAAUA
AGGCUAGUCCGUUAUCAACUUGAAAAAGUGGCACCGAGUCGGUGCGGAAAA
GCGAUCAAGGUGCUGCAGAAGGGA-UGG P1 ext 11 linker 3-
UCUGCUCGAGGCGGGGCUCGUUGGUCUAGGGGUAUGAUUCUCGCUUUGGGU
GCGAGAGGUCCCGGGUUCAAAUCCCGGACGAGCCCCGCCUCGAGCUUUU
FANCF +5 G to T pegRNA sequence:
[SEQ ID NO: 3911]
space, scaffold template and PBSr-
GGAAUCCCUUCUGCAGCACCGUUUUAGAGCUAGAAAUAGCAAGUUAAAAUA
AGGCUAGUCCGUUAUCAACUUGAAAAAGUGGCACCGAGUCGGUGCGGAAAA
GCGAUCAAGGUGCUGCAGAAGGGA-UGG P1 ext 11 linker 8-
UCUCUCUCGCUCGAGGCGGGGCUCGUUGGUCUAGGGGUAUGAUUCUCGCUU
UGGGUGCGAGAGGUCCCGGGUUCAAAUCCCGGACGAGCCCCGCCUCGAGCU
UUU
HEK3 +1 10 nt insertion pegRNA sequence:
[SEQ ID NO: 3913]
space, scaffold template and PBSr-
GGCCCAGACTGAGCACGTGAGTTTTAGAGCTAGAAATAGCAAGTTAAAATA
AGGCTAGTCCGTTATCAACTTGAAAAAGTGGCACCGAGTCGGTGCTCTGCC
ATCAAAGCTTCGACCGTGCTCAGTCTG-UGG P1 ext 5 linker 3-
UCUGGCGGGGCUCGUUGGUCUAGGGGUAUGAUUCUCGCUUUGGGUGCGAGA
GGUCCCGGGUUCAAAUCCCGGACGAGCCCCGCCUUUU
HEK3 +1 FLAG insertion pegRNA sequence:
[SEQ ID NO: 3914]
space, scaffold template and PBSr-
GGCCCAGACUGAGCACGUGAGUUUUAGAGCUAGAAAUAGCAAGUUAAAAUA
AGGCUAGUCCGUUAUCAACUUGAAAAAGUGGCACCGAGUCGGUGCUGGAGG
AAGCAGGGCUUCCUUUCCUCUGCCAUCACUUAUCGUCGUCAUCCUUGUAAU
CCGUGCUCAGUCUG-partial CGG tRNA linker 8-
UCUCUCUCUGGUCUAGGGGUAUGAUUCUCGCUUCGGGUGCGAGAGGUCCCG
GGUUCAAUUUU
HEK3 +1 FLAG insertion pegRNA sequence:
[SEQ ID NO: 3915]
space, scaffold template and PBSr-
GGCCCAGACUGAGCACGUGAGUUUUAGAGCUAGAAAUAGCAAGUUAAAAUA
AGGCUAGUCCGUUAUCAACUUGAAAAAGUGGCACCGAGUCGGUGCUGGAGG
AAGCAGGGCUUCCUUUCCUCUGCCAUCACUUAUCGUCGUCAUCCUUGUAAU
CCGUGCUCAGUCUG-UGG P1 ext 5 linker 3-
UCUGGCGGGGCUCGUUGGUCUAGGGGUAUGAUUCUCGCUUUGGGUGCGAGA
GGUCCCGGGUUCAAAUCCCGGACGAGCCCCGCCUUUU
HEK3 +1 FLAG insertion pegRNA sequence:
[SEQ ID NO: 3916]
space, scaffold template and PBSr-
GGCCCAGACUGAGCACGUGAGUUUUAGAGCUAGAAAUAGCAAGUUAAAAUA
AGGCUAGUCCGUUAUCAACUUGAAAAAGUGGCACCGAGUCGGUGCUGGAGG
AAGCAGGGCUUCCUUUCCUCUGCCAUCACUUAUCGUCGUCAUCCUUGUAAU
CCGUGCUCAGUCUG-UGG P1 ext 5 linker 8-
UCUCUCUCGGCGGGGCUCGUUGGUCUAGGGGUAUGAUUCUCGCUUUGGGUG
CGAGAGGUCCCGGGUUCAAAUCCCGGACGAGCCCCGCCUUUU
HEK3 +1 FLAG insertion pegRNA sequence:
[SEQ ID NO: 3917]
space, scaffold template and PBSr-
GGCCCAGACUGAGCACGUGAGUUUUAGAGCUAGAAAUAGCAAGUUAAAA
UAAGGCUAGUCCGUUAUCAACUUGAAAAAGUGGCACCGAGUCGGUGCUGG
AGGAAGCAGGGCUUCCUUUCCUCUGCCAUCACUUAUCGUCGUCAUCCUUG
UAAUCCGUGCUCAGUCUG-UGG P1 ext 8 linker 8-
UCUCUCUCCGAGGCGGGGCUCGUUGGUCUAGGGGUAUGAUUCUCGCUUUG
GGUGCGAGAGGUCCCGGGUUCAAAUCCCGGACGAGCCCCGCCUCGUUUU
HEK3 +1 FLAG insertion pegRNA sequence:
[SEQ ID NO: 3918]
space, scaffold template and PBSr-
GGCCCAGACUGAGCACGUGAGUUUUAGAGCUAGAAAUAGCAAGUUAAAAUA
AGGCUAGUCCGUUAUCAACUUGAAAAAGUGGCACCGAGUCGGUGCUGGAGG
AAGCAGGGCUUCCUUUCCUCUGCCAUCACUUAUCGUCGUCAUCCUUGUAAU
CCGUGCUCAGUCUG-UGG P1 ext 11 linker 8-
UCUCUCUCGCUCGAGGCGGGGCUCGUUGGUCUAGGGGUAUGAUUCUCGCUU
UGGGUGCGAGAGGUCCCGGGUUCAAAUCCCGGACGAGCCCCGCCUCGAGCU
UUU
HEK3 +1 FLAG insertion pegRNA sequence:
[SEQ ID NO: 3919]
space, scaffold template and PBSr-
GGCCCAGACUGAGCACGUGAGUUUUAGAGCUAGAAAUAGCAAGUUAAAAUA
AGGCUAGUCCGUUAUCAACUUGAAAAAGUGGCACCGAGUCGGUGCUGGAGG
AAGCAGGGCUUCCUUUCCUCUGCCAUCACUUAUCGUCGUCAUCCUUGUAAU
CCGUGCUCAGUCUG-UGG P1 ext 14 linker 8-
UCUCUCUCGGUGCUCGAGGCGGGGCUCGUUGGUCUAGGGGUAUGAUUCUCG
CUUUGGGUGCGAGAGGUCCCGGGUUCAAAUCCCGGACGAGCCCCGCCUCGA
GCACCUUUU
RNF2 +1 C to A pegRNA sequence:
[SEQ ID NO: 3920]
space, scaffold template and PBSr-
GUCAUCUUAGUCAUUACCUGGUUUUAGAGCUAGAAAUAGCAAGUUAAAAUA
AGGCUAGUCCGUUAUCAACUUGAAAAAGUGGCACCGAGUCGGUGCGAACAC
CUCAUGUAAUGACUAAGAUG-tRNA-Pro{CGG}-5-
UCUGGCGGGGCUCGUUGGUCUAGGGGUAUGAUUCUCGCUUCGGGUGCGAGA
GGUCCCGGGUUCAAAUCCCGGACGAGCCCCGCC
RNF2 +1 C to A pegRNA sequence:
[SEQ ID NO: 3921]
space, scaffold template and PBSr-
GUCAUCUUAGUCAUUACCUGGUUUUAGAGCUAGAAAUAGCAAGUUAAAAUA
AGGCUAGUCCGUUAUCAACUUGAAAAAGUGGCACCGAGUCGGUGCGAACAC
CUCAUGUAAUGACUAAGAUG-tRNA-Pro{CGG}-8-
UCUCGAGGCGGGGCUCGUUGGUCUAGGGGUAUGAUUCUCGCUUCGGGUGCG
AGAGGUCCCGGGUUCAAAUCCCGGACGAGCCCCGCCUCGUUUU
RNF2 +1 C to A pegRNA sequence:
[SEQ ID NO: 3922]
space, scaffold template and PBSr-
GUCAUCUUAGUCAUUACCUGGUUUUAGAGCUAGAAAUAGCAAGUUAAAAUA
AGGCUAGUCCGUUAUCAACUUGAAAAAGUGGCACCGAGUCGGUGCGAACAC
CUCAUGUAAUGACUAAGAUG-tRNA-Pro{CGG}-11-
UCUGCUCGAGGCGGGGCUCGUUGGUCUAGGGGUAUGAUUCUCGCUUCGGGU
GCGAGAGGUCCCGGGUUCAAAUCCCGGACGAGCCCCGCCUCGAGCUUUU
RNF2 +1 C to A pegRNA sequence:
[SEQ ID NO: 3923]
space, scaffold template and PBSr-
GUCAUCUUAGUCAUUACCUGGUUUUAGAGCUAGAAAUAGCAAGUUAAAAUA
AGGCUAGUCCGUUAUCAACUUGAAAAAGUGGCACCGAGUCGGUGCGAACAC
CUCAUGUAAUGACUAAGAUG-tRNA-Pro{Lys}-5-
UCUGGCGGGCCCGGAUAGCUCAGUCGGUAGAGCAUCAGACUUUUAAUCUGA
GGGUCCAGGGUUCAAGUCCCUGUUCGGGCCCGCCUUUU
RNF2 +1 C to A pegRNA sequence:
[SEQ ID NO: 3924]
space, scaffold template and PBSr-
GUCAUCUUAGUCAUUACCUGGUUUUAGAGCUAGAAAUAGCAAGUUAAAAUA
AGGCUAGUCCGUUAUCAACUUGAAAAAGUGGCACCGAGUCGGUGCGAACAC
CUCAUGUAAUGACUAAGAUG-tRNA-Pro{Lys}-8-
UCUCGAGGCGGGCCCGGAUAGCUCAGUCGGUAGAGCAUCAGACUUUUAAUC
UGAGGGUCCAGGGUUCAAGUCCCUGUUCGGGCCCGCCUCGUUUU
RNF2 +1 C to A pegRNA sequence:
[SEQ ID NO: 3925]
space, scaffold template and PBSr-
GUCAUCUUAGUCAUUACCUGGUUUUAGAGCUAGAAAUAGCAAGUUAAAAUA
AGGCUAGUCCGUUAUCAACUUGAAAAAGUGGCACCGAGUCGGUGCGAACAC
CUCAUGUAAUGACUAAGAUG-tRNA-Pro{UGG}-8-
UCUCGAGGCGGGGCUCGUUGGUCUAGGGGUAUGAUUCUCGCUUUGGGUGCG
AGAGGUCCCGGGUUCAAAUCCCGGACGAGCCCCGCCUCGUUUU
RNF2 +1 C to A pegRNA sequence:
[SEQ ID NO: 3926]
space, scaffold template and PBSr-
GUCAUCUUAGUCAUUACCUGGUUUUAGAGCUAGAAAUAGCAAGUUAAAAUA
AGGCUAGUCCGUUAUCAACUUGAAAAAGUGGCACCGAGUCGGUGCGAACAC
CUCAUGUAAUGACUAAGAUG-tRNA-Pro{UGG}-11-
UCUGCUCGAGGCGGGGCUCGUUGGUCUAGGGGUAUGAUUCUCGCUUUGGGU
GCGAGAGGUCCCGGGUUCAAAUCCCGGACGAGCCCCGCCUCGAGCUUUU
RNF2 +1 C to A pegRNA sequence:
[SEQ ID NO: 3927]
space, scaffold template and PBSr-
GUCAUCUUAGUCAUUACCUGGUUUUAGAGCUAGAAAUAGCAAGUUAAAAUA
AGGCUAGUCCGUUAUCAACUUGAAAAAGUGGCACCGAGUCGGUGCGAACAC
CUCAUGUAAUGACUAAGAUG-tRNA-Pro{UGG}-8-longer
linker-UCUCUCUCCGAGGCGGGGCUCGUUGGUCUAGGGGUAUGAUUCUC
GCUUUGGGUGCGAGAGGUCCCGGGUUCAAAUCCCGGACGAGCCCCGCCUCG
UUUU
RNF2 +1 C to A pegRNA sequence:
[SEQ ID NO: 3928]
space, scaffold template and PBSr-
GUCAUCUUAGUCAUUACCUGGUUUUAGAGCUAGAAAUAGCAAGUUAAAAUA
AGGCUAGUCCGUUAUCAACUUGAAAAAGUGGCACCGAGUCGGUGCGAACAC
CUCAUGUAAUGACUAAGAUG-tRNA-Pro{UGG}-11-longer
linker-UCUCUCUCGCUCGAGGCGGGGCUCGUUGGUCUAGGGGUAUGAUU
CUCGCUUUGGGUGCGAGAGGUCCCGGGUUCAAAUCCCGGACGAGCCCCGCC
UCGAGCUUUU
RNF2 +1 C to A pegRNA sequence:
[SEQ ID NO: 3929]
space, scaffold template and PBSr-
GUCAUCUUAGUCAUUACCUGGUUUUAGAGCUAGAAAUAGCAAGUUAAAAUA
AGGCUAGUCCGUUAUCAACUUGAAAAAGUGGCACCGAGUCGGUGCGAACAC
CUCAUGUAAUGACUAAGAUG-tRNA-Pro{UGG}-14-longer
linker-UCUCUCUCGGUGCUCGAGGCGGGGCUCGUUGGUCUAGGGGUAUG
AUUCUCGCUUUGGGUGCGAGAGGUCCCGGGUUCAAAUCCCGGACGAGCCCC
GCCUCGAGCACCUUUU

### Example 23. Use of Prime Editing to Correct CDKL5 and Sickle Cell Anemia

[1756] Use of PE to Design Mouse Model of CDKL5 with 1412de1A Mutation

[1757] CDKL5 Deficiency Disorder (CDD) is a neurodegenerative disease most often caused by spontaneous mutations in the cyclin-dependent kinase-like 5 gene. Symptoms manifest in early childhood and include seizures, irregular sleeping patterns, gastrointestinal stress, and developmental delay. Some mutations which cause CDD, including 1412de1A, cannot be corrected with base editing. However, prime editing has the potential to precisely correct all base-to-base changes, deletions, and insertions. With focus on the 1412de1A mutation, this Example designed and tested pegRNAs capable of inserting the mutation in hopes to establish a mouse neuronal cell line (N2A) harboring the mutation. This will allow for extensive screening potentially therapeutic pegRNAs that correct the mutation. The ultimate goal is to be able to move into a CDD mouse model with the 1412de1A mutation to assess therapeutic effect. No current mouse models of CDD have a humanized allele, however optimization of pegRNAs is underway in HEK293T cells as well. FIGS. 87 and 88 are the results from a pilot screen in N2A cells where the pegRNA installs 1412Adel, with details about the primer binding site (PBS) length and reverse transcriptase (RT) template length. (Shown with and without indels)

### Use of PE to Treat Sickle Cell Anemia (SCA)

[1758] Sickle cell anemia (SCA) is a recessive blood disorder caused by a glutamate-to-valine mutation at position 6 in the β-globin gene. The result is sickled red blood cells that are poor oxygen transporters and prone to aggregation. Symptoms of aggregation can be life-threatening. Previously, the D. Liu lab was able to show both the installation and correction of the SCA locus in HEK293T cells using prime editing via DNA plasmid transfection. Since hematopoietic stem cells (HSCs) are difficult to edit via DNA plasmid transfection, this Example tested the PE3 system in HSCs with protein and mRNA nucleofection. FIG. 89 are the results of editing at a proxy locus in the β-globin gene and at HEK3 in healthy HSCs, varying the concentration of editor to pegRNA and nicking gRNA.

mRNA Nucleofection Protocol:

[1759] The protocol was improved by adjusting the ratio of editor to guides ([editor] to [guide] ratio or editor:guide ratio)

[1760] The nicking guide protospacer sequence was: CCTTGATACCAACCTGCCCA (SEQ ID NO: 3991)

[1761] The pegRNA sequence was:

(SEQ ID NO: 3992)
CATGGTGCACCTGACTCCTGGTTTTAGAGCTAGAAATAGCAAGTTAAAATA
AGGCTAGTCCGTTATCAACTTGAAAAAGTGGCACCGAGTCGGTGCAGACTT
CTCTTCAGGAGTCAGGTGCACTTT

[1762] 1. Thaw CD34+ cells and pre-stimulate in X-Vivo15 media with cytokines (SCF, Flt3 and TPO) for 24 hrs. Seeding density 1 million cells/mL.

[1763] 2. Next day (post 24 hrs), aspirate CD34+ cells (1×105) and wash once with PBS (centrifugation performed at 300 g for 10 mins in RT) and resuspend in P3 solution (Lonza) (20 ul per condition).

[1764] 3. In hood, combine 2 ug of SpPE2 mRNA, 1 ug combined of pegRNA and sgRNA in a sterile PCR strip on ice. Adjust the volume to 20 ul (cells in P3 solution+mRNA &gRNA mix).

[1765] 4. Pipette up cell suspension into 20 uL Lonza4D 16 well strip and electroporate with program DS130.

[1766] 5. Wait for 10 to 15 mins post electrporation and add 80 uL of X-Vivo10+cytokine media to cell suspension and transfer to pre-warmed X-Vivo10 with cytokine media.

[1767] 6. Harvest cells 72 hours after electroporation and check the cell recovery and do genotyping in bulk population and sorted CD34+ and CD34+90+ populations as well.

Wildtype CDKL5 protein (Accession No. NP_001032420)
(isoform 1 - human)
(SEQ ID NO: 3993)
MKIPNIGNVM NKFEILGVVG EGAYGVVLKC RHKETHEIVA
IKKFKDSEEN EEVKETTLRE LKMLRTLKQE NIVELKEAFR
RRGKLYLVFE YVEKNMLELL EEMPNGVPPE KVKSYIYQLI
KAIHWCHKND IVHRDIKPEN LLISHNDVLK LCDFGFARNL
SEGNNANYTE YVATRWYRSP ELLLGAPYGK SVDMWSVGCI
LGELSDGQPL FPGESEIDQL FTIQKVLGPL PSEQMKLFYS
NPRFHGLRFP AVNHPQSLER RYLGILNSVL LDLMKNLLKL
DPADRYLTEQ CLNHPTFQTQ RLLDRSPSRS AKRKPYHVES
STLSNRNQAG KSTALQSHHR SNSKDIQNLS VGLPRADEGL
PANESFLNGN LAGASLSPLH TKTYQASSQP GSTSKDLTNN
NIPHLLSPKE AKSKTEFDFN IDPKPSEGPG TKYLKSNSRS
QQNRHSFMES SQSKAGTLQP NEKQSRHSYI DTIPQSSRSP
SYRTKAKSHG ALSDSKSVSN LSEARAQIAE PSTSRYFPSS
CLDLNSPTSP TPTRHSDTRT LLSPSGRNNR NEGTLDSRRT
TTRHSKTMEE LKLPEHMDSS HSHSLSAPHE SFSYGLGYTS
PFSSQQRPHR HSMYVTRDKV RAKGLDGSLS IGQGMAARAN
SLQLLSPQPG EQLPPEMTVA RSSVKETSRE GTSSFHTRQK
SEGGVYHDPH SDDGTAPKEN RHLYNDPVPR RVGSFYRVPS
PRPDNSFHEN NVSTRVSSLP SESSSGTNHS KRQPAFDPWK
SPENISHSEQ LKEKEKQGFF RSMKKKKKKS QTVPNSDSPD
LLTLQKSIHS ASTPSSRPKE WRPEKISDLQ TQSQPLKSLR
KLLHLSSASN HPASSDPRFQ PLTAQQTKNS FSEIRIHPLS
QASGGSSNIR QEPAPKGRPA LQLPDGGCDG RRQRHHSGPQ
DRRFMLRTTE QQGEYFCCGD PKKPHTPCVP NRALHRPISS
PAPYPVLQVR GTSMCPTLQV RGTDAFSCPT QQSGFSFFVR
HVMREALIHR AQVNQAALLT YHENAALTGK
Wildtype CDKL5 protein (Accession No. NP_001310218)
(isoform 2 - human)
(SEQ ID NO: 3994)
MKIPNIGNVM NKFEILGVVG EGAYGVVLKC RHKETHEIVA
IKKFKDSEEN EEVKETTLRE LKMLRTLKQE NIVELKEAFR
RRGKLYLVFE YVEKNMLELL EEMPNGVPPE KVKSYIYQLI
KAIHWCHKND IVHRDIKPEN LLISHNDVLK LCDFGFARNL
SEGNNANYTE YVATRWYRSP ELLLGAPYGK SVDMWSVGCI
LGELSDGQPL FPGESEIDQL FTIQKVLGPL PSEQMKLFYS
NPRFHGLRFP AVNHPQSLER RYLGILNSVL LDLMKNLLKL
DPADRYLTEQ CLNHPTFQTQ RLLDRSPSRS AKRKPYHVES
STLSNRNQAG KSTALQSHHR SNSKDIQNLS VGLPRADEGL
PANESFLNGN LAGASLSPLH TKTYQASSQP GSTSKDLTNN
NIPHLLSPKE AKSKTEFDFN IDPKPSEGPG TKYLKSNSRS
QQNRHSFMES SQSKAGTLQP NEKQSRHSYI DTIPQSSRSP
SYRTKAKSHG ALSDSKSVSN LSEARAQIAE PSTSRYFPSS
CLDLNSPTSP TPTRHSDTRT LLSPSGRNNR NEGTLDSRRT
TTRHSKTMEE LKLPEHMDSS HSHSLSAPHE SFSYGLGYTS
PFSSQQRPHR HSMYVTRDKV RAKGLDGSLS IGQGMAARAN
SLQLLSPQPG EQLPPEMTVA RSSVKETSRE GTSSFHTRQK
SEGGVYHDPH SDDGTAPKEN RHLYNDPVPR RVGSFYRVPS
PRPDNSFHEN NVSTRVSSLP SESSSGTNHS KRQPAFDPWK
SPENISHSEQ LKEKEKQGFF RSMKKKKKKS QTVPNSDSPD
LLTLQKSIHS ASTPSSRPKE WRPEKISDLQ TQSQPLKSLR
KLLHLSSASN HPASSDPRFQ PLTAQQTKNS FSEIRIHPLS
QASGGSSNIR QEPAPKGRPA LQLPGQMDPG WHVSSVTRSA
TEGPSYSEQL GAKSGPNGHP YNRTNRSRMP NLNDLKETAL

### Example 24. Use of Prime Editing to Target Pathogenic AOL1 Alleles as Treatment for Non-Diabetic Chronic Kidney Disease

[1768] This Example designed PEgRNAs that are capable of targeting pathogenic APOL1 alleles for use with prime editing to treat or reduce the likelihood of developing a renal disease.

[1769] End-stage kidney failure (ESKD) is a growing problem that now affects over half a million individuals in the United States. The cost of caring for patients with ESKD is currently over 40 billion dollars per year. In the U.S., the likelihood that subjects of African descent will develop ESKD is 4 to 5 times higher than for Americans without African ancestry. These facts are reflected in the disparity between the 12-13% of the U.S. population with African descent and the 40% of U.S. dialysis patients who are African-American. The epidemic of renal disease risk factors, such as obesity and metabolic syndrome, suggests that the magnitude of this problem will only increase.

[1770] There are no specific therapies for the vast majority of progressive kidney diseases. Some types of chronic renal disease progression can be slowed by blood pressure control with specific agents, but nephrologists cannot accurately predict which patients will respond. Moreover, while successful treatment typically slows progression, it neither prevents disease nor halts disease progression.

[1771] Recently it was determined that that specific genetic variants that alter the protein sequence of APOIipoprotein-L1 (APOL1) are associated with progressive kidney disease. Surprisingly, APOL1 kidney disease variants have a major impact on multiple different types of kidney disease including hypertension-associated end-stage renal disease (H-ESRD), focal segmental glomerulosclerosis (FSGS), and HIV-associated nephropathy (HIVAN). Individuals with these variant APOL1 alleles have a 7-30 fold increased risk for kidney disease. Based on the high frequency of these APOL1 risk alleles, more than 3.5 million African Americans likely have the high risk APOL1 genotype. African Americans without the high risk genotype have little excess risk compared with Americans of European ancestry.

[1772] Despite evidence that variants in the APOL1 gene cause renal disease, very little is known about the biology of its product, APOL1, or its role in the kidney. APOL1 has a defined role in resistance to trypanosomes, and the G1 and G2 variants appear to have become common in Africa because they confer protection against the forms of trypanosomes that cause African Sleeping Sickness.

[1773] There still exists a need for therapies for kidney diseases in patients with one or more APOL1 risk alleles, which cause great morbidity and mortality with high economic impact in this and other subject populations.

[1774] This Example provides three exemplary PEgRNA design options based on a specific exemplary target sequence that may be used with prime editing to correct APOL1 defective alleles.

[1775] PEgRNA 1

[1776] Designing PEgRNAs for APOL1 allele rs73885319 (p.S342G). This represents a G→A correction in affected individuals. The target sequence is 5-GGAGTCAAGCTCACGGATGTGGCCCCTGTA(G-to-A)GCTTCTTTCTTGTG CTGGATGTAGTCTACCT-3. (SEQ ID NO: 3995)

[1777] The protospacer (bolded above) is AAGCTCACGGATGTGGCCCC (SEQ ID NO: 3996). The selected PE comprises a SaCas9(D10A).

[1778] The primer binding sites can be:

(SEQ ID NO: 3997)
GTGGCCCC
(SEQ ID NO: 3998)
TGTGGCCCC
(SEQ ID NO: 3999)
ATGTGGCCCC
(SEQ ID NO: 4000)
GATGTGGCCCC
(SEQ ID NO: 4001)
GGATGTGGCCCC
(SEQ ID NO: 4002)
CGGATGTGGCCCC
(SEQ ID NO: 4003)
ACGGATGTGGCCCC
(SEQ ID NO: 4004)
CACGGATGTGGCCCC
(SEQ ID NO: 4005)
TCACGGATGTGGCCCC
(SEQ ID NO: 4006)
CTCACGGATGTGGCCCC.

[1779] The RT templates can be:

(SEQ ID NO: 4007)
AAGAAGCTTACA
(SEQ ID NO: 4008)
AAAGAAGCTTACA
(SEQ ID NO: 4009)
GAAAGAAGCTTACA
(SEQ ID NO: 4010)
AGAAAGAAGCTTACA
(SEQ ID NO: 4011)
AAGAAAGAAGCTTACA
(SEQ ID NO: 4012)
CAAGAAAGAAGCTTACA
(SEQ ID NO: 4013)
ACAAGAAAGAAGCTTACA
(SEQ ID NO: 4014)
CACAAGAAAGAAGCTTACA
(SEQ ID NO: 4015)
GCACAAGAAAGAAGCTTACA
(SEQ ID NO: 4016)
AGCACAAGAAAGAAGCTTACA
(SEQ ID NO: 4017)
CAGCACAAGAAAGAAGCTTACA
(SEQ ID NO: 4018)
CCAGCACAAGAAAGAAGCTTACA
(SEQ ID NO: 4019)
TCCAGCACAAGAAAGAAGCTTACA
(SEQ ID NO: 4020)
ATCCAGCACAAGAAAGAAGCTTACA.

[1780] The nicking template can be GCTTTGATTCGTACACGAGG (SEQ ID NO: 4021).

[1781] PEgRNA 2

[1782] Designing PEgRNAs for APOL1 allele rs60910145. This represents a G→T correction in affected individuals.

[1783] The protospacer is GCTGGAGGAGAAGCTAAACA. (SEQ ID NO: 4022) The selected PE comprises SpCas9(D10A)-NG.

[1784] The primer binding sites can be:

(SEQ ID NO: 4023)
GAAGCTAA
(SEQ ID NO: 4024)
AGAAGCTAA
(SEQ ID NO: 4025)
GAGAAGCTAA
(SEQ ID NO: 4026)
GGAGAAGCTAA
(SEQ ID NO: 4027)
AGGAGAAGCTAA
(SEQ ID NO: 4028)
GAGGAGAAGCTAA
(SEQ ID NO: 4029)
GGAGGAGAAGCTAA
(SEQ ID NO: 4030)
TGGAGGAGAAGCTAA
(SEQ ID NO: 4031)
CTGGAGGAGAAGCTAA
(SEQ ID NO: 4032)
GCTGGAGGAGAAGCTAA.

[1785] The RT template can be (cannot end in C):

(SEQ ID NO: 4033)
AGAATGT
(SEQ ID NO: 4034)
GAGAATGT
(SEQ ID NO: 4035)
TGAGAATGT
(SEQ ID NO: 4036)
TTGAGAATGT
(SEQ ID NO: 4037)
GTTGAGAATGT
(SEQ ID NO: 4038)
TGTTGAGAATGT
(SEQ ID NO: 4039)
TTGTTGAGAATGT
(SEQ ID NO: 4040)
ATTGTTGAGAATGT
(SEQ ID NO: 4041)
TATTGTTGAGAATGT
(SEQ ID NO: 4042)
TTATTGTTGAGAATGT
(SEQ ID NO: 4043)
ATTATTGTTGAGAATGT
(SEQ ID NO: 4044)
AATTATTGTTGAGAATGT
(SEQ ID NO: 4045)
TAATTATTGTTGAGAATGT
(SEQ ID NO: 4046)
ATAATTATTGTTGAGAATGT.

[1786] The nicking templates can be:

(SEQ ID NO: 4047)
CCTGTGGTCACAGTTCTTGG
(SEQ ID NO: 4048)
CCACAGGGCAGGGCAGCCAC.

[1787] PEgRNA 3

[1788] Designing PEgRNAs for APOL1 allele rs71785313. This represents an insert, as follows: ATTCTCAACAA[insert: TAATTA]TAAGATTC (SEQ ID NO: 4049).

[1789] The protospacer can be: TCTCAACAATAAGATTCTGC (SEQ ID NO: 4050)

[1790] The PE comprises SaKKH-PE2.

[1791] The primer binding site can be:

(SEQ ID NO: 4051)
TTCTCAAC
(SEQ ID NO: 4052)
ATTCTCAAC
(SEQ ID NO: 4053)
CATTCTCAAC
(SEQ ID NO: 4054)
ACATTCTCAAC
(SEQ ID NO: 4055)
AACATTCTCAAC
(SEQ ID NO: 4056)
AAACATTCTCAAC
(SEQ ID NO: 4057)
TAAACATTCTCAAC
(SEQ ID NO: 4058)
CTAAACATTCTCAAC
(SEQ ID NO: 4059)
GCTAAACATTCTCAAC
(SEQ ID NO: 4060)
AGCTAAACATTCTCAAC.

[1792] The nicking templates can be:

(SEQ ID NO: 4061)
AATCTTATAATTATT
(SEQ ID NO: 4062)
GAATCTTATAATTATT
(SEQ ID NO: 4063)
AGAATCTTATAATTATT
(SEQ ID NO: 4064)
CAGAATCTTATAATTATT
(SEQ ID NO: 4065)
GCAGAATCTTATAATTATT
(SEQ ID NO: 4066)
TGCAGAATCTTATAATTATT
(SEQ ID NO: 4067)
CTGCAGAATCTTATAATTATT
(SEQ ID NO: 4068)
CCTGCAGAATCTTATAATTATT
(SEQ ID NO: 4069)
GCCTGCAGAATCTTATAATTATT
(SEQ ID NO: 4070)
CGCCTGCAGAATCTTATAATTATT
(SEQ ID NO: 4071)
CCGCCTGCAGAATCTTATAATTATT
(SEQ ID NO: 4072)
TCCGCCTGCAGAATCTTATAATTATT
(SEQ ID NO: 4073)
GTCCGCCTGCAGAATCTTATAATTATT
(SEQ ID NO: 4074)
GGTCCGCCTGCAGAATCTTATAATTATT.

[1793] CCTGTGGTCACAGTTCTTGG (SEQ ID NO: 4047)

[1794] CCACAGGGCAGGGCAGCCAC(SEQ ID NO: 4048).

### Other References Mentioned Throughout this Disclosure

[1795] The following references are each incorporated herein by reference in their entireties.
[1796] 1. Jinek, M. et al. A Programmable Dual-RNA-Guided DNA Endonuclease in Adaptive Bacterial Immunity. Science 337, 816-821 (2012).
[1797] 2. Cong, L. et al. Multiplex Genome Engineering Using CRISPR/Cas Systems. Science 339, 819-823 (2013).
[1798] 3. Komor, A. C., Badran, A. H. & Liu, D. R. CRISPR-Based Technologies for the Manipulation of Eukaryotic Genomes. Cell 168, 20-36 (2017).
[1799] 4. Komor, A. C., Kim, Y. B., Packer, M. S., Zuris, J. A. & Liu, D. R. Programmable editing of a target base in genomic DNA without double-stranded DNA cleavage. Nature 533, 420-424 (2016).
[1800] 5. Nishida, K. et al. Targeted nucleotide editing using hybrid prokaryotic and vertebrate adaptive immune systems. Science 353, aaf8729 (2016).
[1801] 6. Gaudelli, N. M. et al. Programmable base editing of A⋅T to G⋅C in genomic DNA without DNA cleavage. Nature 551, 464-471 (2017).
[1802] 7. ClinVar, July 2019.
[1803] 8. Dunbar, C. E. et al. Gene therapy comes of age. Science 359, eaan4672 (2018).
[1804] 9. Cox, D. B. T., Platt, R. J. & Zhang, F. Therapeutic genome editing: prospects and challenges. Nat. Med. 21, 121-131 (2015).
[1805] 10. Adli, M. The CRISPR tool kit for genome editing and beyond. Nat. Commun. 9, 1911 (2018).
[1806] 11. Kleinstiver, B. P. et al. Engineered CRISPR-Cas9 nucleases with altered PAM specificities. Nature 523, 481-485 (2015).
[1807] 12. Kleinstiver, B. P. et al. High-fidelity CRISPR-Cas9 nucleases with no detectable genome-wide off-target effects. Nature 529, 490-495 (2016).
[1808] 13. Hu, J. H. et al. Evolved Cas9 variants with broad PAM compatibility and high DNA specificity. Nature 556, 57-63 (2018).
[1809] 14. Nishimasu, H. et al. Engineered CRISPR-Cas9 nuclease with expanded targeting space. Science 361, 1259-1262 (2018).
[1810] 15. Jasin, M. & Rothstein, R. Repair of strand breaks by homologous recombination. Cold Spring Harb. Perspect. Biol. 5, a012740 (2013).
[1811] 16. Paquet, D. et al. Efficient introduction of specific homozygous and heterozygous mutations using CRISPR/Cas9. Nature 533, 125-129 (2016).
[1812] 17. Kosicki, M., Tomberg, K. & Bradley, A. Repair of double-strand breaks induced by CRISPR-Cas9 leads to large deletions and complex rearrangements. Nat. Biotechnol. 36, 765-771 (2018).
[1813] 18. Haapaniemi, E., Botla, S., Persson, J., Schmierer, B. & Taipale, J. CRISPR-Cas9 genome editing induces a p53-mediated DNA damage response. Nat. Med. 24, 927-930 (2018).
[1814] 19. Ihry, R. J. et al. p53 inhibits CRISPR-Cas9 engineering in human pluripotent stem cells. Nat. Med. 24, 939-946 (2018).
[1815] 20. Richardson, C. D., Ray, G. J., DeWitt, M. A., Curie, G. L. & Corn, J. E. Enhancing homology-directed genome editing by catalytically active and inactive CRISPR-Cas9 using asymmetric donor DNA. Nat. Biotechnol. 34, 339-344 (2016).
[1816] 21. Srivastava, M. et al. An Inhibitor of Nonhomologous End-Joining Abrogates Double-Strand Break Repair and Impedes Cancer Progression. Cell 151, 1474-1487 (2012).
[1817] 22. Chu, V. T. et al. Increasing the efficiency of homology-directed repair for CRISPR-Cas9-induced precise gene editing in mammalian cells. Nat. Biotechnol. 33, 543-548 (2015).
[1818] 23. Maruyama, T. et al. Increasing the efficiency of precise genome editing with CRISPR-Cas9 by inhibition of nonhomologous end joining. Nat. Biotechnol. 33, 538-542 (2015).
[1819] 24. Kim, Y. B. et al. Increasing the genome-targeting scope and precision of base editing with engineered Cas9-cytidine deaminase fusions. Nat. Biotechnol. 35, 371-376 (2017).
[1820] 25. Li, X. et al. Base editing with a Cpf1-cytidine deaminase fusion. Nat. Biotechnol. 36, 324-327 (2018).
[1821] 26. Gehrke, J. M. et al. An APOBEC3A-Cas9 base editor with minimized bystander and off-target activities. Nat. Biotechnol. (2018). doi:10.1038/nbt.4199
[1822] 27. Rees, H. A. & Liu, D. R. Base editing: precision chemistry on the genome and transcriptome of living cells. Nat. Rev. Genet. 1 (2018). doi:10.1038/s41576-018-0059-1.
[1823] 28. Ostertag, E. M. & Kazazian Jr, H. H. Biology of Mammalian L1 Retrotransposons. Annu. Rev. Genet. 35, 501-538 (2001).
[1824] 29. Zimmerly, S., Guo, H., Perlman, P. S. & Lambowltz, A. M. Group II intron mobility occurs by target DNA-primed reverse transcription. Cell 82, 545-554 (1995).
[1825] 30. Luan, D. D., Korman, M. H., Jakubczak, J. L. & Eickbush, T. H. Reverse transcription of R2Bm RNA is primed by a nick at the chromosomal target site: a mechanism for non-LTR retrotransposition. Cell 72, 595-605 (1993).
[1826] 31. Feng, Q., Moran, J. V., Kazazian, H. H. & Boeke, J. D. Human L1 retrotransposon encodes a conserved endonuclease required for retrotransposition. Cell 87, 905-916 (1996).
[1827] 32. Jinek, M. et al. Structures of Cas9 Endonucleases Reveal RNA-Mediated Conformational Activation. Science 343, 1247997 (2014).
[1828] 33. Jiang, F. et al. Structures of a CRISPR-Cas9 R-loop complex primed for DNA cleavage. Science aad8282 (2016). doi:10.1126/science.aad8282
[1829] 34. Qi, L. S. et al. Repurposing CRISPR as an RNA-Guided Platform for Sequence-Specific Control of Gene Expression. Cell 152, 1173-1183 (2013).
[1830] 35. Tang, W., Hu, J. H. & Liu, D. R. Aptazyme-embedded guide RNAs enable ligand-responsive genome editing and transcriptional activation. Nat. Commun. 8, 15939 (2017).
[1831] 36. Shechner, D. M., Hacisuleyman, E., Younger, S. T. & Rinn, J. L. Multiplexable, locus-specific targeting of long RNAs with CRISPR-Display. Nat. Methods 12, 664-670 (2015).
[1832] 37. Anders, C. & Jinek, M. Chapter One—In vitro Enzymology of Cas9. in Methods in Enzymology (eds. Doudna, J. A. & Sontheimer, E. J.) 546, 1-20 (Academic Press, 2014).
[1833] 38. Briner, A. E. et al. Guide RNA Functional Modules Direct Cas9 Activity and Orthogonality. Mol. Cell 56, 333-339 (2014).
[1834] 39. Nowak, C. M., Lawson, S., Zerez, M. & Bleris, L. Guide RNA engineering for versatile Cas9 functionality. Nucleic Acids Res. 44, 9555-9564 (2016).
[1835] 40. Sternberg, S. H., Redding, S., Jinek, M., Greene, E. C. & Doudna, J. A. DNA interrogation by the CRISPR RNA-guided endonuclease Cas9. Nature 507, 62-67 (2014).
[1836] 41. Mohr, S. et al. Thermostable group II intron reverse transcriptase fusion proteins and their use in cDNA synthesis and next-generation RNA sequencing. RNA 19, 958-970 (2013).
[1837] 42. Stamos, J. L., Lentzsch, A. M. & Lambowitz, A. M. Structure of a Thermostable Group II Intron Reverse Transcriptase with Template-Primer and Its Functional and Evolutionary Implications. Mol. Cell 68, 926-939.e4 (2017).
[1838] 43. Zhao, C. & Pyle, A. M. Crystal structures of a group II intron maturase reveal a missing link in spliceosome evolution. Nat. Struct. Mol. Biol. 23, 558-565 (2016).
[1839] 44. Zhao, C., Liu, F. & Pyle, A. M. An ultraprocessive, accurate reverse transcriptase encoded by a metazoan group II intron. RNA 24, 183-195 (2018).
[1840] 45. Ran, F. A. et al. Genome engineering using the CRISPR-Cas9 system. Nat. Protoc. 8, 2281-2308 (2013).
[1841] 46. Liu, Y., Kao, H.-I. & Bambara, R. A. Flap endonuclease 1: a central component of DNA metabolism. Annu. Rev. Biochem. 73, 589-615 (2004).
[1842] 47. Krokan, H. E. & Bjpris, M. Base Excision Repair. Cold Spring Harb. Perspect. Biol. 5, (2013).
[1843] 48. Kelman, Z. PCNA: structure, functions and interactions. Oncogene 14, 629-640 (1997).
[1844] 49. Choe, K. N. & Moldovan, G.-L. Forging Ahead through Darkness: PCNA, Still the Principal Conductor at the Replication Fork. Mol. Cell 65, 380-392 (2017).
[1845] 50. Li, X., Li, J., Harrington, J., Lieber, M. R. & Burgers, P. M. Lagging strand DNA synthesis at the eukaryotic replication fork involves binding and stimulation of FEN-1 by proliferating cell nuclear antigen. J. Biol. Chem. 270, 22109-22112 (1995).
[1846] 51. Tom, S., Henricksen, L. A. & Bambara, R. A. Mechanism whereby proliferating cell nuclear antigen stimulates flap endonuclease 1. J. Biol. Chem. 275, 10498-10505 (2000).
[1847] 52. Tanenbaum, M. E., Gilbert, L. A., Qi, L. S., Weissman, J. S. & Vale, R. D. A protein-tagging system for signal amplification in gene expression and fluorescence imaging. Cell 159, 635-646 (2014).
[1848] 53. Bertrand, E. et al. Localization of ASH1 mRNA particles in living yeast. Mol. Cell 2, 437-445 (1998).
[1849] 54. Dahlman, J. E. et al. Orthogonal gene knockout and activation with a catalytically active Cas9 nuclease. Nat. Biotechnol. 33, 1159-1161 (2015).
[1850] 55. Tsai, S. Q. et al. GUIDE-seq enables genome-wide profiling of off-target cleavage by CRISPR-Cas nucleases. Nat. Biotechnol. 33, 187-197 (2015).
[1851] 56. Tsai, S. Q. et al. CIRCLE-seq: a highly sensitive in vitro screen for genome-wide CRISPR-Cas9 nuclease off-targets. Nat. Methods 14, 607-614 (2017).
[1852] 57. Schek N, Cooke C, Alwine J C. Molecular and Cellular Biology. (1992).
[1853] 58. Gil A, Proudfoot N J. Cell. (1987).
[1854] 59. Zhao, B. S., Roundtree, I. A., He, C. Nat Rev Mol Cell Biol. (2017).
[1855] 60. Rubio, M. A. T., Hopper, A. K. Wiley Interdiscip Rev RNA (2011).
[1856] 61. Shechner, D. M., Hacisuleyman E., Younger, S. T., Rinn, J. L. Nat Methods. (2015).
[1857] 62. Paige, J. S., Wu, K. Y., Jaffrey, S. R. Science (2011).
[1858] 63. Ray D., . . . Hughes T R. Nature (2013).
[1859] 64. Chadalavada, D. M., Cerrone-Szakal, A. L., Bevilacqua, P. C. RNA (2007).
[1860] 65. Forster A C, Symons R H. Cell. (1987).
[1861] 66. Weinberg Z, Kim P B, Chen T H, Li S, Harris K A, Lunse C E, Breaker R R. Nat. Chem. Biol. (2015).
[1862] 67. Feldstein P A, Buzayan J M, Bruening G. Gene (1989).
[1863] 68. Saville B J, Collins R A. Cell. (1990).
[1864] 69. Winkler W C, Nahvi A, Roth A, Collins J A, Breaker R R. Nature (2004).
[1865] 70. Roth A, Weinberg Z, Chen A G, Kim P G, Ames T D, Breaker R R. Nat Chem Biol.
[1866] (2013).
[1867] 71. Choudhury R, Tsai Y S, Dominguez D, Wang Y, Wang Z. Nat Commun. (2012).
[1868] 72. MacRae I J, Doudna J A. Curr Opin Struct Biol. (2007).
[1869] 73. Bernstein E, Caudy A A, Hammond S M, Hannon G J Nature (2001).
[1870] 74. Filippov V, Solovyev V, Filippova M, Gill S S. Gene (2000).
[1871] 75. Cadwell R C and Joyce G F. PCR Methods Appl. (1992).
[1872] 76. McInerney P, Adams P, and Hadi M Z. Mol Biol Int. (2014).
[1873] 77. Esvelt K M, Carlson J C, and Liu D R. Nature. (2011).
[1874] 78. Naorem S S, Hin J, Wang S, Lee W R, Heng X, Miller J F, Guo H. Proc Natl Acad Sci USA (2017).
[1875] 79. Martinez M A, Vartanian J P, Wain-Hobson S. Proc Natl Acad Sci USA (1994).
[1876] 80. Meyer A J, Ellefson J W, Ellington A D. Curr Protoc Mol Biol. (2014).
[1877] 81. Wang H H, Isaacs F J, Carr P A, Sun Z Z, Xu G, Forest C R, Church G M. Nature. (2009).
[1878] 82. Nyerges Á et al. Proc Natl Acad Sci USA. (2016).
[1879] 83. Mascola J R, Haynes B F. Immunol Rev. (2013).
[1880] 84. X. Wen, K. Wen, D. Cao, G. Li, R. W. Jones, J. Li, S. Szu, Y. Hoshino, L. Yuan, Inclusion of a universal tetanus toxoid CD4(+) T cell epitope P2 significantly enhanced the immunogenicity of recombinant rotavirus ΔVP8* subunit parenteral vaccines. Vaccine 32, 4420-4427 (2014).
[1881] 85. G. Ada, D. Isaacs, Carbohydrate-protein conjugate vaccines. Clin Microbiol Infect 9, 79-85 (2003).
[1882] 86. E. Malito, B. Bursulaya, C. Chen, P. L. Surdo, M. Picchianti, E. Balducci, M. Biancucci, A. Brock, F. Berti, M. J. Bottomley, M. Nissum, P. Costantino, R. Rappuoli, G. Spraggon, Structural basis for lack of toxicity of the diphtheria toxin mutant CRM197. Proceedings of the National Academy of Sciences 109, 5229 (2012).
[1883] 87. J. de Wit, M. E. Emmelot, M. C. M. Poelen, J. Lanfermeijer, W. G. H. Han, C. van Els, P. Kaaijk, The Human CD4(+) T Cell Response against Mumps Virus Targets a Broadly Recognized Nucleoprotein Epitope. J Virol 93, (2019).
[1884] 88. M. May, C. A. Rieder, R. J. Rowe, Emergent lineages of mumps virus suggest the need for a polyvalent vaccine. Int J Infect Dis 66, 1-4 (2018).
[1885] 89. M. Ramamurthy, P. Rajendiran, N. Saravanan, S. Sankar, S. Gopalan, B. Nandagopal,
[1886] Identification of immunogenic B-cell epitope peptides of rubella virus E1 glycoprotein towards development of highly specific immunoassays and/or vaccine. Conference Abstract, (2019).
[1887] 90. U. S. F. Tambunan, F. R. P. Sipahutar, A. A. Parikesit, D. Kerami, Vaccine Design for H5N1 Based on B- and T-cell Epitope Predictions. Bioinform Biol Insights 10, 27-35 (2016).
[1888] 91. Asante, E A. et. al. “A naturally occurring variant of the human prion protein completely prevents prion disease”. Nature. (2015).
[1889] 92. Crabtree, G. R. & Schreiber, S. L. Three-part inventions: intracellular signaling and induced proximity. Trends Biochem. Sci. 21, 418-22 (1996).
[1890] 93. Liu, J. et al. Calcineurin Is a Common Target of A and FKBP-FK506 Complexes. Cell 66, 807-815 (1991).
[1891] 94. Keith, C. T. et al. A mammalian protein targeted by G1-arresting rapamycin-receptor complex. Nature 369, 756-758 (2003).
[1892] 95. Spencer, D. M., Wandless, T. J., Schreiber, S. L. S. & Crabtree, G. R. Controlling signal transduction with synthetic ligands. Science 262, 1019-24 (1993).
[1893] 96. Pruschy, M. N. et al. Mechanistic studies of a signaling pathway activated by the organic dimerizer FK1012. Chem. Biol. 1, 163-172 (1994).
[1894] 97. Spencer, D. M. et al. Functional analysis of Fas signaling in vivo using synthetic inducers of dimerization. Curr. Biol. 6, 839-847 (1996).
[1895] 98. Belshaw, P. J., Spencer, D. M., Crabtree, G. R. & Schreiber, S. L. Controlling programmed cell death with a cyclophilin-cyclosporin-based chemical inducer of dimerization. Chem. Biol. 3, 731-738 (1996).
[1896] 99. Yang, J. X., Symes, K., Mercola, M. & Schreiber, S. L. Small-molecule control of insulin and PDGF receptor signaling and the role of membrane attachment. Curr. Biol. 8, 11-18 (1998).
[1897] 100. Belshaw, P. J., Ho, S. N., Crabtree, G. R. & Schreiber, S. L. Controlling protein association and subcellular localization with a synthetic ligand that induces heterodimerization of proteins. Proc. Natl. Acad. Sci. 93, 4604-4607 (2002).
[1898] 101. Stockwell, B. R. & Schreiber, S. L. Probing the role of homomeric and heteromeric receptor interactions in TGF-β signaling using small molecule dimerizers. Curr. Biol. 8, 761-773 (2004).
[1899] 102. Spencer, D. M., Graef, I., Austin, D. J., Schreiber, S. L. & Crabtree, G. R. A general strategy for producing conditional alleles of Src-like tyrosine kinases. Proc. Natl. Acad. Sci. 92, 9805-9809 (2006).
[1900] 103. Holsinger, L. J., Spencer, D. M., Austin, D. J., Schreiber, S. L. & Crabtree, G. R. Signal transduction in T lymphocytes using a conditional allele of Sos. Proc. Natd. Acad. Sci. 92, 9810-9814 (2006).
[1901] 104. Myers, M. G. Insulin Signal Transduction and the IRS Proteins. Annu. Rev. Pharmacol. Toxicol. 36, 615-658 (1996).
[1902] 105. Watowich, S. S. The erythropoietin receptor: Molecular structure and hematopoietic signaling pathways. J. Investig. Med. 59, 1067-1072 (2011).
[1903] 106. Blau, C. A., Peterson, K. R., Drachman, J. G. & Spencer, D. M. A proliferation switch for genetically modified cells. Proc. Natd. Acad. Sci. 94, 3076-3081 (2002).
[1904] 107. Clackson, T. et al. Redesigning an FKBP-ligand interface to generate chemical dimerizers with novel specificity. Proc. Natd. Acad. Sci. 95, 10437-10442 (1998).
[1905] 108. Diver, S. T. & Schreiber, S. L. Single-step synthesis of cell-permeable protein dimerizers that activate signal transduction and gene expression. J. Am. Chem. Soc. 119, 5106-5109(1997).
[1906] 109. Guo, Z. F., Zhang, R. & Liang, F. Sen. Facile functionalization of FK506 for biological studies by the thiol-ene ‘click’ reaction. RSC Adv. 4, 11400-11403 (2014).
[1907] 110. Robinson, D. R., Wu, Y.-M. & Lin, S.-F. The protein tyrosine kinase family of the human genome. Oncogene 19, 5548-5557 (2000).
[1908] 111. Landrum, M. J. et al. ClinVar: public archive of interpretations of clinically relevant variants. Nucleic Acids Res. 44, D862-D868 (2016).
[1909] 112. Jinek, M. et al. A Programmable Dual-RNA-Guided DNA Endonuclease in Adaptive Bacterial Immunity. Science 337, 816-821 (2012).
[1910] 113. Cong, L. et al. Multiplex Genome Engineering Using CRISPR/Cas Systems. Science 339, 819-823 (2013).
[1911] 114. Mali, P. et al. RNA-Guided Human Genome Engineering via Cas9. Science 339, 823-826 (2013).
[1912] 115. Yang, H. et al. One-Step Generation of Mice Carrying Reporter and Conditional Alleles by CRISPR/Cas-Mediated Genome Engineering. Cell 154, 1370-1379 (2013).
[1913] 116. Kim, S., Kim, D., Cho, S. W., Kim, J. & Kim, J.-S. Highly efficient RNA-guided genome editing in human cells via delivery of purified Cas9 ribonucleoproteins. Genome Res. 24, 1012-1019 (2014).
[1914] 117. Orlando, S. J. et al. Zinc-finger nuclease-driven targeted integration into mammalian genomes using donors with limited chromosomal homology. Nucleic Acids Res. 38, e152-e152 (2010).
[1915] 118. Tsai, S. Q. et al. GUIDE-seq enables genome-wide profiling of off-target cleavage by CRISPR-Cas nucleases. Nat. Biotechnol. 33, 187-197 (2015).
[1916] 119. Suzuki, K. et al. In vivo genome editing via CRISPR/Cas9 mediated homology-independent targeted integration. Nature 540, 144-149 (2016).
[1917] 120. Kosicki, M., Tomberg, K. & Bradley, A. Repair of double-strand breaks induced by CRISPR-Cas9 leads to large deletions and complex rearrangements. Nat. Biotechnol.
[1918] 36, 765-771 (2018).
[1919] 121. Haapaniemi, E., Botla, S., Persson, J., Schmierer, B. & Taipale, J. CRISPR-Cas9 genome editing induces a p53-mediated DNA damage response. Nat. Med. 24, 927-930 (2018).
[1920] 122. Ihry, R. J. et al. p53 inhibits CRISPR-Cas9 engineering in human pluripotent stem cells. Nat. Med. 24, 939-946 (2018).
[1921] 123. Chapman, J. R., Taylor, M. R. G. & Boulton, S. J. Playing the end game: DNA double-strand break repair pathway choice. Mol. Cell 47, 497-510 (2012).
[1922] 124. Cox, D. B. T., Platt, R. J. & Zhang, F. Therapeutic genome editing: prospects and challenges. Nat. Med. 21, 121-131 (2015).
[1923] 125. Paquet, D. et al. Efficient introduction of specific homozygous and heterozygous mutations using CRISPR/Cas9. Nature 533, 125-129 (2016).
[1924] 126. Chu, V. T. et al. Increasing the efficiency of homology-directed repair for CRISPR-Cas9-induced precise gene editing in mammalian cells. Nat. Biotechnol. 33, 543-548 (2015).
[1925] 127. Maruyama, T. et al. Increasing the efficiency of precise genome editing with CRISPR-Cas9 by inhibition of nonhomologous end joining. Nat. Biotechnol. 33, 538-542 (2015).
[1926] 128. Rees, H. A., Yeh, W.-H. & Liu, D. R. Development of hRad51-Cas9 nickase fusions that mediate HDR without double-stranded breaks. Nat. Commun. 10, 1-12 (2019).
[1927] 129. Komor, A. C., Kim, Y. B., Packer, M. S., Zuris, J. A. & Liu, D. R. Programmable editing of a target base in genomic DNA without double-stranded DNA cleavage. Nature 533, 420-424 (2016).
[1928] 130. Gaudelli, N. M. et al. Programmable base editing of A⋅T to G⋅C in genomic DNA without DNA cleavage. Nature 551, 464-471 (2017).
[1929] 131. Gao, X. et al. Treatment of autosomal dominant hearing loss by in vivo delivery of genome editing agents. Nature 553, 217-221 (2018).
[1930] 132. Ingram, V. M. A specific chemical difference between the globins of normal human and sickle-cell anaemia haemoglobin. Nature 178, 792-794 (1956).
[1931] 133. Myerowitz, R. & Costigan, F. C. The major defect in Ashkenazi Jews with Tay-Sachs disease is an insertion in the gene for the alpha-chain of beta-hexosaminidase. J. Biol.
[1932] Chem. 263, 18587-18589 (1988).
[1933] 134. Zielenski, J. Genotype and Phenotype in Cystic Fibrosis. Respiration 67, 117-133 (2000).
[1934] 135. Mead, S. et al. A Novel Protective Prion Protein Variant that Colocalizes with Kuru Exposure. N. Engl. J. Med. 361, 2056-2065 (2009).
[1935] 136. Marraffini, L. A. & Sontheimer, E. J. CRISPR interference limits horizontal gene transfer in staphylococci by targeting DNA. Science 322, 1843-1845 (2008).
[1936] 137. Barrangou, R. et al. CRISPR provides acquired resistance against viruses in prokaryotes. Science 315, 1709-1712 (2007).
[1937] 138. Jiang, F. & Doudna, J. A. CRISPR-Cas9 Structures and Mechanisms. Annu. Rev.
[1938] Biophys. 46, 505-529 (2017).
[1939] 139. Hille, F. et al. The Biology of CRISPR-Cas: Backward and Forward. Cell 172, 1239-1259 (2018).
[1940] 140. Luan, D. D., Korman, M. H., Jakubczak, J. L. & Eickbush, T. H. Reverse transcription of R2Bm RNA is primed by a nick at the chromosomal target site: a mechanism for non-LTR retrotransposition. Cell 72, 595-605 (1993).
[1941] 141. Liu, Y., Kao, H.-I. & Bambara, R. A. Flap endonuclease 1: a central component of DNA metabolism. Annu. Rev. Biochem. 73, 589-615 (2004).
[1942] 142. Rees, H. A. & Liu, D. R. Base editing: precision chemistry on the genome and transcriptome of living cells. Nat. Rev. Genet. 19, 770 (2018).
[1943] 143. Richardson, C. D., Ray, G. J., DeWitt, M. A., Curie, G. L. & Corn, J. E. Enhancing homology-directed genome editing by catalytically active and inactive CRISPR-Cas9 using asymmetric donor DNA. Nat. Biotechnol. 34, 339-344 (2016).
[1944] 144. Qi, L. S. et al. Repurposing CRISPR as an RNA-Guided Platform for Sequence-Specific Control of Gene Expression. Cell 152, 1173-1183 (2013).
[1945] 145. Shechner, D. M., Hacisuleyman, E., Younger, S. T. & Rinn, J. L. Multiplexable, locus-specific targeting of long RNAs with CRISPR-Display. Nat. Methods 12, 664-670 (2015).
[1946] 146. Tang, W., Hu, J. H. & Liu, D. R. Aptazyme-embedded guide RNAs enable ligand-responsive genome editing and transcriptional activation. Nat. Commun. 8, 15939 (2017).
[1947] 147. Jinek, M. et al. Structures of Cas9 Endonucleases Reveal RNA-Mediated Conformational Activation. Science 343, 1247997 (2014).
[1948] 148. Nishimasu, H. et al. Crystal Structure of Cas9 in Complex with Guide RNA and Target DNA. Cell 156, 935-949 (2014).
[1949] 149. Jiang, F., Zhou, K., Ma, L., Gressel, S. & Doudna, J. A. A Cas9-guide RNA complex preorganized for target DNA recognition. Science 348, 1477-1481 (2015).
[1950] 150. Baranauskas, A. et al. Generation and characterization of new highly thermostable and processive M-MuLV reverse transcriptase variants. Protein Eng. Des. Sel. 25, 657-668 (2012).
[1951] 151. Gerard, G. F. et al. The role of template-primer in protection of reverse transcriptase from thermal inactivation. Nucleic Acids Res. 30, 3118-3129 (2002).
[1952] 152. Arezi, B. & Hogrefe, H. Novel mutations in Moloney Murine Leukemia Virus reverse transcriptase increase thermostability through tighter binding to template-primer. Nucleic Acids Res. 37, 473-481 (2009).
[1953] 153. Kotewicz, M. L., Sampson, C. M., D'Alessio, J. M. & Gerard, G. F. Isolation of cloned Moloney murine leukemia virus reverse transcriptase lacking ribonuclease H activity. Nucleic Acids Res. 16, 265-277 (1988).
[1954] 154. Shen, M. W. et al. Predictable and precise template-free CRISPR editing of pathogenic variants. Nature 563, 646-651 (2018).
[1955] 155. Thuronyi, B. W. et al. Continuous evolution of base editors with expanded target compatibility and improved activity. Nat. Biotechnol. (2019). doi:10.1038/s41587-019-0193-0
[1956] 156. Kim, Y. B. et al. Increasing the genome-targeting scope and precision of base editing with engineered Cas9-cytidine deaminase fusions. Nat. Biotechnol. 35, 371-376 (2017).
[1957] 157. Koblan, L. W. et al. Improving cytidine and adenine base editors by expression optimization and ancestral reconstruction. Nat. Biotechnol. (2018). doi:10.1038/nbt.4172
[1958] 158. Komor, A. C. et al. Improved base excision repair inhibition and bacteriophage Mu Gam protein yields C:G-to-T:A base editors with higher efficiency and product purity.
[1959] Sci. Adv. 3, eaao4774 (2017).
[1960] 159. Kleinstiver, B. P. et al. High-fidelity CRISPR-Cas9 nucleases with no detectable genome-wide off-target effects. Nature 529, 490-495 (2016).
[1961] 160. Zuo, E. et al. Cytosine base editor generates substantial off-target single-nucleotide variants in mouse embryos. Science 364, 289-292 (2019).
[1962] 161. Jin, S. et al. Cytosine, but not adenine, base editors induce genome-wide off-target mutations in rice. Science 364, 292-295 (2019).
[1963] 162. Kim, D., Kim, D., Lee, G., Cho, S.-I. & Kim, J.-S. Genome-wide target specificity of CRISPR RNA-guided adenine base editors. Nat. Biotechnol. 37, 430-435 (2019).
[1964] 163. Grunewald, J. et al. Transcriptome-wide off-target RNA editing induced by CRISPR-guided DNA base editors. Nature 569, 433-437 (2019).
[1965] 164. Zhou, C. et al. Off-target RNA mutation induced by DNA base editing and its elimination by mutagenesis. Nature 571, 275-278 (2019).
[1966] 165. Rees, H. A., Wilson, C., Doman, J. L. & Liu, D. R. Analysis and minimization of cellular RNA editing by DNA adenine base editors. Sci. Adv. 5, eaax5717 (2019).
[1967] 166. Ostertag, E. M. & Kazazian Jr, H. H. Biology of Mammalian L1 Retrotransposons. Annu. Rev. Genet. 35, 501-538 (2001).
[1968] 167. Griffiths, D. J. Endogenous retroviruses in the human genome sequence. Genome Biol. 2, REVIEWS1017 (2001).
[1969] 168. Berkhout, B., Jebbink, M. & Zsiros, J. Identification of an Active Reverse Transcriptase Enzyme Encoded by a Human Endogenous HERV-K Retrovirus. J. Virol. 73, 2365-2375 (1999).
[1970] 169. Halvas, E. K., Svarovskaia, E. S. & Pathak, V. K. Role of Murine Leukemia Virus Reverse Transcriptase Deoxyribonucleoside Triphosphate-Binding Site in Retroviral Replication and In Vivo Fidelity. J. Virol. 74, 10349-10358 (2000).
[1971] 170. Dever, D. P. et al. CRISPR/Cas9 Beta-globin Gene Targeting in Human Hematopoietic Stem Cells. Nature 539, 384-389 (2016).
[1972] 171. Park, S. H. et al. Highly efficient editing of the β-globin gene in patient-derived hematopoietic stem and progenitor cells to treat sickle cell disease. Nucleic Acids Res. doi:10.1093/nar/gkz475
[1973] 172. Collinge, J. Prion diseases of humans and animals: their causes and molecular basis. Annu. Rev. Neurosci. 24, 519-550 (2001).
[1974] 173. Asante, E. A. et al. A naturally occurring variant of the human prion protein completely prevents prion disease. Nature 522, 478-481 (2015).
[1975] 174. Anzalone, A. V., Lin, A. J., Zairis, S., Rabadan, R. & Cornish, V. W. Reprogramming eukaryotic translation with ligand-responsive synthetic RNA switches. Nat. Methods 13, 453-458 (2016).
[1976] 175. Badran, A. H. et al. Continuous evolution of Bacillus thuringiensis toxins overcomes insect resistance. Nature 533, 58-63 (2016).
[1977] 176. Anders, C. & Jinek, M. Chapter One—In Vitro Enzymology of Cas9. in Methods in Enzymology (eds. Doudna, J. A. & Sontheimer, E. J.) 546, 1-20 (Academic Press,
[1978] 2014).
[1979] 177. Pirakitikulr, N., Ostrov, N., Peralta-Yahya, P. & Cornish, V. W. PCRless library mutagenesis via oligonucleotide recombination in yeast. Protein Sci. Publ. Protein Soc. 19, 2336-2346 (2010).
[1980] 178. Clement, K. et al. CRISPResso2 provides accurate and rapid genome editing sequence analysis. Nat. Biotechnol. 37, 224-226 (2019).
[1981] 179. Tsai, S. Q. et al. GUIDE-seq enables genome-wide profiling of off-target cleavage by CRISPR-Cas nucleases. Nat. Biotechnol. 33, 187-197 (2015).
[1982] 180. Kleinstiver, B. P. et al. High-fidelity CRISPR-Cas9 nucleases with no detectable genome-wide off-target effects. Nature 529, 490-495 (2016).
[1983] 181. Koblan, L. W. et al. Improving cytidine and adenine base editors by expression optimization and ancestral reconstruction. Nat. Biotechnol. (2018). doi:10.1038/nbt.4172
[1984] 182. Baranauskas, A. et al. Generation and characterization of new highly thermostable and processive M-MuLV reverse transcriptase variants. Protein Eng. Des. Sel. 25, 657-668 (2012).
[1985] 183. Schechner, D M, Hacisuleyman E., Younger S T, Rinn J L. Nat Methods 664-70 (2015).
[1986] 184. Brown J A, et al. Nat Struct Mol Biol 633-40 (2014).
[1987] 185. Conrad N A and Steitz J A. EMBO J 1831-41 (2005).
[1988] 186. Bartlett J S, et al. Proc Natl Acad Sci USA 8852-7 (1996).
[1989] 187. Mitton-Fry R M, DeGregorio S J, Wang J, Steitz T A, Steitz J A. Science 1244-7 (2010).
[1990] 188. Forster A C, Symons R H. Cell. 1987.
[1991] 189. Weinberg Z, Kim P B, Chen T H, Li S, Harris K A, Lunse C E, Breaker R R. Nat. Chem. Biol. 2015.
[1992] 190. Feldstein P A, Buzayan J M, Bruening G. Gene 1989.
[1993] 191. Saville B J, Collins R A. Cell. 1990.
[1994] 192. Roth A, Weinberg Z, Chen A G, Kim P G, Ames T D, Breaker R R. Nat Chem Biol.
[1995] 2013.
[1996] 193. Borchardt E K, et al. RNA 1921-30 (2015).
[1997] 194. Zhang Y, et al. Mol Cell 792-806 (2013).
[1998] 195. Dang Y, et al. Genome Biol 280 (2015).
[1999] 196. Schaefer M, Kapoor U, and Jantsch M F. Open Biol 170077 (2017).
[2000] 197. Nahar S, et al. Chem Comm 2377-80 (2018).
[2001] 198. Gao Y and Zhao Y. J Integr Plant Biol 343-9 (2014).
[2002] 199. Dubois N, Marquet R, Paillart J, Bernacchi S. Front Microbiol 527 (2018).
[2003] 200. Costa M and Michel F. EMBO J 1276-85 (1995).
[2004] 201. Hu J H, et al. Nature 57-63 (2018).
[2005] 202. Furukawa K, Gu H, Breaker R R. Methods Mol Biol 209-20 (2014).
[2006] 203. Zettler, J., Schutz, V. & Mootz, H. D. The naturally split Npu DnaE intein exhibits an extraordinarily high rate in the protein trans-splicing reaction. FEBS Lett. 583, 909-914 (2009).
[2007] 204. Kiigler, S., Kilic, E. & Bahr, M. Human synapsin 1 gene promoter confers highly neuron-specific long-term transgene expression from an adenoviral vector in the adult rat brain depending on the transduced area. Gene Ther. 10, 337-347 (2003).
[2008] 205. de Felipe, P., Hughes, L. E., Ryan, M. D. & Brown, J. D. Co-translational, intraribosomal cleavage of polypeptides by the foot-and-mouth disease virus 2A peptide. J. Biol. Chem. 278, 11441-11448 (2003).
[2009] 206. Levy, J. M. & Nicoll, R. A. Membrane-associated guanylate kinase dynamics reveal regional and developmental specificity of synapse stability. J. Physiol. 595, 1699-1709 (2017).
[2010] 207. Li, B. & Dewey, C. N. RSEM: accurate transcript quantification from RNA-Seq data with or without a reference genome. BMC Bioinformatics 12, 323 (2011).
[2011] 208. Ritchie, M. E. et al. limma powers differential expression analyses for RNA-sequencing and microarray studies. Nucleic Acids Res. 43, e47-e47 (2015).

### Embodiments

[2012] The following embodiments are within the scope of the present disclosure. Furthermore, the disclosure encompasses all variations, combinations, and permutations of these embodiments in which one or more limitations, elements, clauses, and descriptive terms from one or more of the listed embodiments is introduced into another listed embodiment in this section. For example, any listed embodiment that is dependent on another embodiment can be modified to include one or more limitations found in any other listed embodiment in this section that is dependent on the same base embodiment. Where elements are presented as lists, e.g., in Markush group format, each subgroup of the elements is also disclosed, and any element(s) can be removed from the group. It should it be understood that, in general, where the disclosure, or aspects of the disclosure, is/are referred to as comprising particular elements and/or features, certain embodiments of the invention or aspects of the invention consist, or consist essentially of, such elements and/or features. It is also noted that the terms “comprising” and “containing” are intended to be open and permits the inclusion of additional elements or steps. Where ranges are given, endpoints are included. Furthermore, unless otherwise indicated or otherwise evident from the context and understanding of one of ordinary skill in the art, values that are expressed as ranges can assume any specific value or sub-range within the stated ranges in different embodiments of the invention, to the tenth of the unit of the lower limit of the range, unless the context clearly dictates otherwise.

### Group 1. Embodiments 1-212

[2013] 1. A fusion protein comprising a nucleic acid programmable DNA binding protein (napDNAbp) and a reverse transcriptase.
2. The fusion protein of embodiment 1, wherein the fusion protein is capable of carrying out genome editing by target-primed reverse transcription in the presence of an extended guide RNA.
3. The fusion protein of embodiment 1, wherein the napDNAbp has a nickase activity.
4. The fusion protein of embodiment 1, wherein the napDNAbp is a Cas9 protein or variant thereof.
5. The fusion protein of embodiment 1, wherein the napDNAbp is a nuclease active Cas9, a nuclease inactive Cas9 (dCas9), or a Cas9 nickase (nCas9).
6. The fusion protein of embodiment 1, wherein the napDNAbp is Cas9 nickase (nCas9).
7. The fusion protein of embodiment 1, wherein the napDNAbp is selected from the group consisting of: Cas9, CasX, CasY, Cpf1, C2c1, C2c2, C2C3, and Argonaute and optionally has a nickase activity.
8. The fusion protein of embodiment 1, wherein the fusion protein when complexed with an extended guide RNA is capable of binding to a target DNA sequence.
9. The fusion protein of embodiment 8, wherein the target DNA sequence comprises a target strand and a complementary non-target strand.
10. The fusion protein of embodiment 8, wherein the binding of the fusion protein complexed to the extended guide RNA forms an R-loop.
11. The fusion protein of embodiment 10, wherein the R-loop comprises (i) an RNA-DNA hybrid comprising the extended guide RNA and the target strand, and (ii) the complementary non-target strand.
12. The fusion protein of embodiment 11, wherein the complementary non-target strand is nicked to form a reverse transcriptase priming sequence having a free 3′ end.
13. The fusion protein of embodiment 2, wherein the extended guide RNA comprises (a) a guide RNA, and (b) an RNA extension at the 5′ or the 3′ end of the guide RNA, or at an intramolecular location in the guide RNA.
14. The fusion protein of embodiment 13, wherein the RNA extension comprises (i) a reverse transcription template sequence comprising a desired nucleotide change, (ii) a reverse transcription primer binding site, and (iii) optionally, a linker sequence.
15. The fusion protein of embodiment 14, wherein the reverse transcription template sequence encodes a single-strand DNA flap that is complementary to an endogenous DNA sequence adjacent to the nick site, wherein the single-strand DNA flap comprises the desired nucleotide change.
16. The fusion protein of embodiment 13, wherein the RNA extension is at least 5 nucleotides, at least 6 nucleotides, at least 7 nucleotides, at least 8 nucleotides, at least 9 nucleotides, at least 10 nucleotides, at least 11 nucleotides, at least 12 nucleotides, at least 13 nucleotides, at least 14 nucleotides, at least 15 nucleotides, at least 16 nucleotides, at least 17 nucleotides, at least 18 nucleotides, at least 19 nucleotides, at least 20 nucleotides, at least 21 nucleotides, at least 22 nucleotides, at least 23 nucleotides, at least 24 nucleotides, or at least 25 nucleotides in length.
17. The fusion protein of embodiment 15, wherein the single-strand DNA flap hybridizes to the endogenous DNA sequence adjacent to the nick site, thereby installing the desired nucleotide change.
18. The fusion protein of embodiment 15, wherein the single-stranded DNA flap displaces the endogenous DNA sequence adjacent to the nick site and which has a free 5′ end.
19. The fusion protein of embodiment 18, wherein the endogenous DNA sequence having the 5′ end is excised by the cell.
20. The fusion protein of embodiment 18, wherein cellular repair of the single-strand DNA flap results in installation of the desired nucleotide change, thereby forming a desired product.
21. The fusion protein of embodiment 14, wherein the desired nucleotide change is installed in an editing window that is between about −4 to +10 of the PAM sequence, or between about −10 to +20 of the PAM sequence, or between about −20 to +40 of the PAM sequence, or between about −30 to +100 of the PAM sequence, or wherein the desired nucleotide change is installed at least 1, 2, 3, 4, 5, 6, 7, 8, 9, 10, 11, 12, 13, 14, 15, 16, 17, 18, 19, 20, 21, 22, 23, 24, 25, 26, 27, 28, 29, 30, 31, 32, 33, 34, 35, 36, 37, 38, 39, 40, 41, 42, 43, 44, 45, 46, 47, 48, 49, 50, 51, 52, 53, 54, 55, 56, 57, 58, 59, 60, 61, 62, 63, 64, 65, 66, 67, 68, 69, 70, 71, 72, 73, 74, 75, 76, 77, 78, 79, 80, 81, 82, 83, 84, 85, 86, 87, 88, 89, 90, 91, 92, 93, 94, 95, 96, 97, 98, 99, or 100 nucleotides downstream of the nick site.
22. The fusion protein of embodiment 1, wherein the napDNAbp comprises an amino acid sequence of SEQ ID NO: 18, or an amino acid sequence that is at least 80%, 85%, 90%, 95%, 98%, or 99% identical to the amino acid sequence to SEQ ID NO: 18.
23. The fusion protein of embodiment 1, wherein the napDNAbp comprises an amino acid sequence that is at least 80%, 85%, 90%, 95%, 98%, or 99% identical to the amino acid sequence of any one of SEQ ID NOs: 18-88, 126, 130, 137, 141, 147, 153, 157, 445, 460, 467, and 482-487.
24. The fusion protein of embodiment 1, wherein the reverse transcriptase comprises any one of the amino acid sequences of SEQ ID NOs: 89-100, 105-122, 128-129, 132, 139, 143, 149, 154, 159, 235, 454, 471, 516, 662, 700, 701-716, 739-741, and 766.
25. The fusion protein of embodiment 1, wherein the reverse transcriptase comprises an amino acid sequence that is at least 80%, 85%, 90%, 95%, 98%, or 99% identical to the amino acid sequence of any one of SEQ ID NOs: 89-100, 105-122, 128-129, 132, 139, 143, 149, 154, 159, 235, 454, 471, 516, 662, 700, 701-716, 739-741, and 766.
26. The fusion protein of embodiment 1, wherein the reverse transcriptase is a naturally-occurring reverse transcriptase from a retrovirus or a retrotransposon.
27. The fusion protein of any one of the previous embodiments, wherein the fusion protein comprises the structure NH₂-[napDNAbp]—[reverse transcriptase]-COOH; or NH₂-[reverse transcriptase]-[napDNAbp]-COOH, wherein each instance of “]-[” indicates the presence of an optional linker sequence.
28. The fusion protein of embodiment 27, wherein the linker sequence comprises an amino acid sequence of SEQ ID NO: 127, 165-176, 446, 453, and 767-769.
29. The fusion protein of embodiment 14, wherein the desired nucleotide change is a single nucleotide change, an insertion of one or more nucleotides, or a deletion of one or more nucleotides.
30. The fusion protein of embodiment 29, wherein the insert or deletion is at least 1, at least 2, at least 3, at least 4, at least 5, at least 6, at least 7, at least 8, at least 9, at least 10, at least 11, at least 12, at least 13, at least 14, at least 15, at least 16, at least 17, at least 18, at least 19, at least 20, at least 21, at least 22, at least 23, at least 24, at least 25, at least 26, at least 27, at least 28, at least 29, at least 30, at least 31, at least 32, at least 33, at least 34, at least 35, at least 36, at least 37, at least 38, at least 39, at least 40, at least 41, at least 42, at least 43, at least 44, at least 45, at least 46, at least 47, at least 48, at least 49, or at least 50.
31. An extended guide RNA comprising a guide RNA and at least one RNA extension.
32. The extended guide RNA of embodiment 1, wherein the RNA extension is position at the 3′ or 5′ end of the guide RNA, or at an intramolecular position in the guide RNA.
33. The extended guide RNA of embodiment 31, wherein the extended guide RNA is capable of binding to a napDNAbp and directing the napDNAbp to a target DNA sequence.
34. The extended guide RNA of embodiment 33, wherein the target DNA sequence comprises a target strand and a complementary non-target strand, wherein the guide RNA hybridizes to the target strand to form an RNA-DNA hybrid and an R-loop.
35. The extended guide RNA of embodiment 31, wherein the at least one RNA extension comprises (i) a reverse transcription template sequence, (ii) a reverse transcription primer binding site, and (iii) optionally a linker sequence.
36. The extended guide RNA of embodiment 35, wherein the RNA extension is at least 5 nucleotides, at least 6 nucleotides, at least 7 nucleotides, at least 8 nucleotides, at least 9 nucleotides, at least 10 nucleotides, at least 11 nucleotides, at least 12 nucleotides, at least 13 nucleotides, at least 14 nucleotides, at least 15 nucleotides, at least 16 nucleotides, at least 17 nucleotides, at least 18 nucleotides, at least 19 nucleotides, at least 20 nucleotides, at least 21 nucleotides, at least 22 nucleotides, at least 23 nucleotides, at least 24 nucleotides, or at least 25 nucleotides in length.
37. The extended guide RNA of embodiment 35, wherein the reverse transcription template sequence is at least 3 nucleotides, at least 4 nucleotides, at least 5 nucleotides, at least 6 nucleotides, at least 7 nucleotides, at least 8 nucleotides, at least 9 nucleotides, at least 10 nucleotides, at least 11 nucleotides, at least 12 nucleotides, at least 13 nucleotides, at least 14 nucleotides, or at least 15 nucleotides in length.
38. The extended guide RNA of embodiment 35, wherein the reverse transcription primer binding site sequence is at least 3 nucleotides, at least 4 nucleotides, at least 5 nucleotides, at least 6 nucleotides, at least 7 nucleotides, at least 8 nucleotides, at least 9 nucleotides, at least 10 nucleotides, at least 11 nucleotides, at least 12 nucleotides, at least 13 nucleotides, at least 14 nucleotides, or at least 15 nucleotides in length.
39. The extended guide RNA of embodiment 35, wherein the optional linker sequence is at least 3 nucleotides, at least 4 nucleotides, at least 5 nucleotides, at least 6 nucleotides, at least 7 nucleotides, at least 8 nucleotides, at least 9 nucleotides, at least 10 nucleotides, at least 11 nucleotides, at least 12 nucleotides, at least 13 nucleotides, at least 14 nucleotides, or at least 15 nucleotides in length.
40. The extended guide RNA of embodiment 35, wherein the reverse transcription template sequence encodes a single-strand DNA flap that is complementary to an endogenous DNA sequence adjacent to a nick site, wherein the single-strand DNA flap comprises a desired nucleotide change.
41. The extended guide RNA of embodiment 40, wherein the single-stranded DNA flap displaces an endogenous single-strand DNA having a 5′ end in the target DNA sequence that has been nicked, and wherein the endogenous single-strand DNA is immediately adjacent downstream of the nick site.
42. The extended guide RNA of embodiment 41, wherein the endogenous single-stranded DNA having the free 5′ end is excised by the cell.
43. The extended guide RNA of embodiment 41, wherein cellular repair of the single-strand DNA flap results in installation of the desired nucleotide change, thereby forming a desired product.
44. The extended guide RNA of embodiment 31, comprising the nucleotide sequence of SEQ ID NOs: 394, 429-442, 641-649, 678-692, 2997-3103, 3113-3121, 3305-3455, 3479-3493, 3522-3556, 3628-3698, and 3755-3810, or a nucleotide sequence having at least 85%, or at least 90%, or at least 95%, or at least 98%, or at least 99% sequence identity with any one of SEQ ID NOs: 394, 429-442, 641-649, 678-692, 2997-3103, 3113-3121, 3305-3455, 3479-3493, 3522-3556, 3628-3698, and 3755-3810.
45. The extended guide RNA of embodiment 35, wherein the reverse transcription template sequence comprises a nucleotide sequence that is at least 80%, or 85%, or 90%, or 95%, or 99% identical to the endogenous DNA target.
46. The extended guide RNA of embodiment 35, wherein the reverse transcription primer binding site hybridizes with a free 3′ end of the cut DNA.
47. The extended guide RNA of embodiment 35, wherein the optional linker sequence is at least 1 nucleotide, or at least 2, at least 3, at least 4, at least 5, at least 6, at least 7, at least 8, at least 9, at least 10, at least 11, at least 12, at least 13, at least 14, or at least 15 nucleotides in length.
48. A complex comprising a fusion protein of any one of embodiments 1-30 and an extended guide RNA.
49. The complex of embodiment 48, wherein the extended guide RNA comprises a guide RNA and an RNA extension at the 3′ or 5′ end of the guide RNA or at an intramolecular position in the guide RNA.
50. The complex of embodiment 48, wherein the extended guide RNA is capable of binding to a napDNAbp and directing the napDNAbp to a target DNA sequence.
51. The complex of embodiment 50, wherein the target DNA sequence comprises a target strand and a complementary non-target strand, wherein the guide RNA hybridizes to the target strand to form an RNA-DNA hybrid and an R-loop.
52. The complex of embodiment 49, wherein the at least one RNA extension comprises (i) a reverse transcription template sequence, (ii) a reverse transcription primer binding site, and (iii) optionally a linker sequence.
53. The complex of embodiment 48, wherein the extended guide RNA comprises the nucleotide sequence of SEQ ID NOs: 394, 429-442, 641-649, 678-692, 2997-3103, 3113-3121, 3305-3455, 3479-3493, 3522-3556, 3628-3698, and 3755-3810, or a nucleotide sequence having at least 85%, or at least 90%, or at least 95%, or at least 98%, or at least 99% sequence identity with any one of SEQ ID NOs: 394, 429-442, 641-649, 678-692, 2997-3103, 3113-3121, 3305-3455, 3479-3493, 3522-3556, 3628-3698, and 3755-3810.
54. The complex of embodiment 52, wherein the reverse transcription template sequence comprises a nucleotide sequence having at least 80%, or 85%, or 90%, or 95%, or 99% sequence identity with the endogenous DNA target.
55. The complex of embodiment 52, wherein the reverse transcription primer binding site hybridizes with a free 3′ end of the cut DNA.
56. A complex comprising a napDNAbp and an extended guide RNA.
57. The complex of embodiment 56, wherein the napDNAbp is a Cas9 nickase.
58. The complex of embodiment 56, wherein the napDNAbp comprises an amino acid sequence of SEQ ID NO: 18, or an amino acid sequence having at least 80%, 85%, 90%, 95%, 98%, or 99% sequence identity with SEQ ID NO: 18.
59. The complex of embodiment 57, wherein the napDNAbp comprises an amino acid sequence having at least 80%, 85%, 90%, 95%, 98%, or 99% sequence identity with the amino acid sequence of any one of SEQ ID NOs: 18-88, 126, 130, 137, 141, 147, 153, 157, 445, 460, 467, and 482-487.
60. The complex of embodiment 57, wherein the extended guide RNA comprises a guide RNA and an RNA extension at the 3′ or 5′ end of the guide RNA, or at an intramolecular position in the guide RNA.
61. The complex of embodiment 57, wherein the extended guide RNA is capable of directing the napDNAbp to a target DNA sequence.
62. The complex of embodiment 61, wherein the target DNA sequence comprises a target strand and a complementary non-target strand, wherein the spacer sequence hybridizes to the target strand to form an RNA-DNA hybrid and an R-loop.
63. The complex of embodiment 61, wherein the RNA extension comprises (i) a reverse transcription template sequence, (ii) a reverse transcription primer binding site, and (iii) optionally a linker sequence.
64. The complex of embodiment 57, wherein the extended guide RNA comprises the nucleotide sequence of SEQ ID NOs: 394, 429-442, 641-649, 678-692, 2997-3103, 3113-3121, 3305-3455, 3479-3493, 3522-3556, 3628-3698, and 3755-3810, or a nucleotide sequence having at least 85%, or at least 90%, or at least 95%, or at least 98%, or at least 99% sequence identity with any one of SEQ ID NOs: 394, 429-442, 641-649, 678-692, 2997-3103, 3113-3121, 3305-3455, 3479-3493, 3522-3556, 3628-3698, and 3755-3810.
65. The complex of embodiment 63, wherein the reverse transcription template sequence comprises a nucleotide sequence that is at least 80%, or 85%, or 90%, or 95%, or 99% identical to the endogenous DNA target.
66. The complex of embodiment 63, wherein the reverse transcription primer binding site hybridizes with a free 3′ end of the cut DNA.
67. The complex of embodiment 63, wherein the optional linker sequence is at least 1 nucleotide, or at least 2, at least 3, at least 4, at least 5, at least 6, at least 7, at least 8, at least 9, at least 10, at least 11, at least 12, at least 13, at least 14, or at least 15 nucleotides in length.
68. A polynucleotide encoding the fusion protein of any of embodiments 1-30.
69. A vector comprising the polynucleotide of embodiment 68.
70. A cell comprising the fusion protein of any of embodiments 1-30 and an extended guide RNA bound to the napDNAbp of the fusion protein.
71. A cell comprising a complex of any one of embodiments 48-67.
72. A pharmaceutical composition comprising: (i) a fusion protein of any of embodiments 1-30, the complex of embodiments 48-67, the polynucleotide of embodiment 68, or the vector of embodiment 69; and (ii) a pharmaceutically acceptable excipient.
73. A pharmaceutical composition comprising: (i) the complex of embodiments 48-67 (ii) reverse transcriptase provided in trans; and (iii) a pharmaceutically acceptable excipient.
74. A kit comprising a nucleic acid construct, comprising: (i) a nucleic acid sequencing encoding the fusion protein of any one of embodiments 1-30; and (ii) a promoter that drives expression of the sequence of (i).
75. A method for installing a desired nucleotide change in a double-stranded DNA sequence, the method comprising:
[2014] (i) contacting the double-stranded DNA sequence with a complex comprising a fusion protein and an extended guide RNA, wherein the fusion protein comprises a napDNAbp and a reverse transcriptase and wherein the extended guide RNA comprises a reverse transcription template sequence comprising the desired nucleotide change;
[2015] (ii) nicking the double-stranded DNA sequence on the non-target strand, thereby generating a free single-strand DNA having a 3′ end;
[2016] (iii) hybridizing the 3′ end of the free single-strand DNA to the reverse transcription template sequence, thereby priming the reverse transcriptase domain;
[2017] (iv) polymerizing a strand of DNA from the 3′ end, thereby generating a single-strand DNA flap comprising the desired nucleotide change;
[2018] (v) replacing an endogenous DNA strand adjacent the cut site with the single-strand DNA flap, thereby installing the desired nucleotide change in the double-stranded DNA sequence.
   76. The method of embodiment 75, wherein the step of (v) replacing comprises: (i) hybridizing the single-strand DNA flap to the endogenous DNA strand adjacent the cut site to create a sequence mismatch; (ii) excising the endogenous DNA strand; and (iii) repairing the mismatch to form the desired product comprising the desired nucleotide change in both strands of DNA.
   77. The method of embodiment 76, wherein the desired nucleotide change is a single nucleotide substitution, a deletion, or an insertion.
   78. The method of embodiment 77, wherein the single nucleotide substitution is a transition or a transversion.
   79. The method of embodiment 76, wherein the desired nucleotide change is (1) a G to T substitution, (2) a G to A substitution, (3) a G to C substitution, (4) a T to G substitution, (5) a T to A substitution, (6) a T to C substitution, (7) a C to G substitution, (8) a C to T substitution, (9) a C to A substitution, (10) an A to T substitution, (11) an A to G substitution, or (12) an A to C substitution.
   80. The method of embodiment 76, wherein the desired nucleoid change converts (1) a G:C basepair to a T:A basepair, (2) a G:C basepair to an A:T basepair, (3) a G:C basepair to C:G basepair, (4) a T:A basepair to a G:C basepair, (5) a T:A basepair to an A:T basepair, (6) a T:A basepair to a C:G basepair, (7) a C:G basepair to a G:C basepair, (8) a C:G basepair to a T:A basepair, (9) a C:G basepair to an A:T basepair, (10) an A:T basepair to a T:A basepair, (11) an A:T basepair to a G:C basepair, or (12) an A:T basepair to a C:G basepair.
   81. The method of embodiment 76, wherein the desired nucleotide change is an insertion or deletion of 1, 2, 3, 4, 5, 6, 7, 8, 9, 10, 11, 12, 13, 14, 15, 16, 17, 18, 19, 20, 21, 22, 23, 24, or 25 nucleotides.
   82. The method of embodiment 76, wherein the desired nucleotide change corrects a disease-associated gene.
   83. The method of embodiment 82, wherein the disease-associated gene is associated with a monogentic disorder selected from the group consisting of: Adenosine Deaminase (ADA) Deficiency; Alpha-1 Antitrypsin Deficiency; Cystic Fibrosis; Duchenne Muscular Dystrophy; Galactosemia; Hemochromatosis; Huntington's Disease; Maple Syrup Urine Disease; Marfan Syndrome; Neurofibromatosis Type 1; Pachyonychia Congenita; Phenylkeotnuria; Severe Combined Immunodeficiency; Sickle Cell Disease; Smith-Lemli-Opitz Syndrome; and Tay-Sachs Disease.
   84. The method of embodiment 82, wherein the disease-associated gene is associated with a polygenic disorder selected from the group consisting of: heart disease; high blood pressure; Alzheimer's disease; arthritis; diabetes; cancer; and obesity.
   85. The method of embodiment 76, wherein the napDNAbp is a nuclease dead Cas9 (dCas9), a Cas9 nickase (nCas9), or a nuclease active Cas9.
   86. The method of embodiment 76, wherein the napDNAbp comprises an amino acid sequence of SEQ ID NO: 18.
   87. The method of embodiment 76, wherein the napDNAbp comprises an amino acid sequence having at least 80%, 85%, 90%, 95%, 98%, or 99% sequence identity with the amino acid sequence of any one of SEQ ID NOs: 18-88, 126, 130, 137, 141, 147, 153, 157, 445, 460, 467, and 482-487.
   88. The method of embodiment 76, wherein the reverse transcriptase comprises any one of the amino acid sequences of SEQ ID NOs: 89-100, 105-122, 128-129, 132, 139, 143, 149, 154, 159, 235, 454, 471, 516, 662, 700, 701-716, 739-741, and 766.
   89. The method of embodiment 76, wherein the reverse transcriptase domain comprises an amino acid sequence having at least 80%, 85%, 90%, 95%, 98%, or 99% sequence identity with the amino acid sequence of any one of SEQ ID NOs: 89-100, 105-122, 128-129, 132, 139, 143, 149, 154, 159, 235, 454, 471, 516, 662, 700, 701-716, 739-741, and 766.
   90. The method of embodiment 76, wherein the extended guide RNA comprises an RNA extension at the 3′ or 5′ ends or at an intramolecular location in the guide RNA, wherein the RNA extension comprises the reverse transcription template sequence.
   91. The method of embodiment 90, wherein the RNA extension is at least 5 nucleotides, at least 6 nucleotides, at least 7 nucleotides, at least 8 nucleotides, at least 9 nucleotides, at least 10 nucleotides, at least 11 nucleotides, at least 12 nucleotides, at least 13 nucleotides, at least 14 nucleotides, at least 15 nucleotides, at least 16 nucleotides, at least 17 nucleotides, at least 18 nucleotides, at least 19 nucleotides, at least 20 nucleotides, at least 21 nucleotides, at least 22 nucleotides, at least 23 nucleotides, at least 24 nucleotides, or at least 25 nucleotides in length.
   92. The method of embodiment 76, wherein the extended guide RNA has a nucleotide sequence selected from the group consisting of SEQ ID NOs: 394, 429-442, 641-649, 678-692, 2997-3103, 3113-3121, 3305-3455, 3479-3493, 3522-3556, 3628-3698, and 3755-3810.
   93. A method for introducing one or more changes in the nucleotide sequence of a DNA molecule at a target locus, comprising:
[2019] (i) contacting the DNA molecule with a nucleic acid programmable DNA binding protein (napDNAbp) and a guide RNA which targets the napDNAbp to the target locus, wherein the guide RNA comprises a reverse transcriptase (RT) template sequence comprising at least one desired nucleotide change;
[2020] (ii) forming an exposed 3′ end in a DNA strand at the target locus;
[2021] (iii) hybridizing the exposed 3′ end to the RT template sequence to prime reverse transcription;
[2022] (iv) synthesizing a single strand DNA flap comprising the at least one desired nucleotide change based on the RT template sequence by reverse transcriptase;
[2023] (v) and incorporating the at least one desired nucleotide change into the corresponding endogenous DNA, thereby introducing one or more changes in the nucleotide sequence of the DNA molecule at the target locus.
   94. The method of embodiment 93, wherein the one or more changes in the nucleotide sequence comprises a transition.
   95. The method of embodiment 94, wherein the transition is selected from the group consisting of: (a) T to C; (b) A to G; (c) C to T; and (d) G to A.
   96. The method of embodiment 93, wherein the one or more changes in the nucleotide sequence comprises a transversion.
   97. The method of embodiment 96, wherein the transversion is selected from the group consisting of: (a) T to A; (b) T to G; (c) C to G; (d) C to A; (e) A to T; (f) A to C; (g) G to C; and (h) G to T.
   98. The method of embodiment 93, wherein the one or more changes in the nucleotide sequence comprises changing (1) a G:C basepair to a T:A basepair, (2) a G:C basepair to an A:T basepair, (3) a G:C basepair to C:G basepair, (4) a T:A basepair to a G:C basepair, (5) a T:A basepair to an A:T basepair, (6) a T:A basepair to a C:G basepair, (7) a C:G basepair to a G:C basepair, (8) a C:G basepair to a T:A basepair, (9) a C:G basepair to an A:T basepair, (10) an A:T basepair to a T:A basepair, (11) an A:T basepair to a G:C basepair, or (12) an A:T basepair to a C:G basepair.
   99. The method of embodiment 93, wherein the one or more changes in the nucleotide sequence comprises an insertion or deletion of 1, 2, 3, 4, 5, 6, 7, 8, 9, 10, 11, 12, 13, 14, 15, 16, 17, 18, 19, 20, 21, 22, 23, 24, or 25 nucleotides.
   100. The method of embodiment 93, wherein the one or more changes in the nucleotide sequence comprises a correction to a disease-associated gene.
   101. The method of embodiment 100, wherein the disease-associated gene is associated with a monogentic disorder selected from the group consisting of: Adenosine Deaminase (ADA) Deficiency; Alpha-1 Antitrypsin Deficiency; Cystic Fibrosis; Duchenne Muscular Dystrophy; Galactosemia; Hemochromatosis; Huntington's Disease; Maple Syrup Urine Disease; Marfan Syndrome; Neurofibromatosis Type 1; Pachyonychia Congenita; Phenylkeotnuria; Severe Combined Immunodeficiency; Sickle Cell Disease; Smith-Lemli-Opitz Syndrome; and Tay-Sachs Disease.
   102. The method of embodiment 100, wherein the disease-associated gene is associated with a polygenic disorder selected from the group consisting of: heart disease; high blood pressure; Alzheimer's disease; arthritis; diabetes; cancer; and obesity.
   103. The method of embodiment 93, wherein the napDNAbp is a nuclease active Cas9 or variant thereof.
   104. The method of embodiment 93, wherein the napDNAbp is a nuclease inactive Cas9 (dCas9) or Cas9 nickase (nCas9), or a variant thereof.
   105. The method of embodiment 93, wherein the napDNAbp comprises an amino acid sequence of SEQ ID NO: 18.
   106. The method of embodiment 93, wherein the napDNAbp comprises an amino acid sequence having at least 80%, 85%, 90%, 95%, 98%, or 99% sequence identity with the amino acid sequence of any one of SEQ ID NOs: 18-88, 126, 130, 137, 141, 147, 153, 157, 445, 460, 467, and 482-487.
   107. The method of embodiment 93, wherein the reverse transcriptase is introduced in trans.
   108. The method of embodiment 93, wherein the napDNAbp comprises a fusion to a reverse transcriptase.
   109. The method of embodiment 93, wherein the reverse transcriptase comprises any one of the amino acid sequences of SEQ ID NOs: 89-100, 105-122, 128-129, 132, 139, 143, 149, 154, 159, 235, 454, 471, 516, 662, 700, 701-716, 739-741, and 766.
   110. The method of embodiment 93, wherein the reverse transcriptase comprises an amino acid sequence having at least 80%, 85%, 90%, 95%, 98%, or 99% sequence identity with the amino acid sequence of any one of SEQ ID NOs: 89-100, 105-122, 128-129, 132, 139, 143, 149, 154, 159, 235, 454, 471, 516, 662, 700, 701-716, 739-741, and 766.
   111. The method of embodiment 93, wherein the step of forming an exposed 3′ end in the DNA strand at the target locus comprises nicking the DNA strand with a nuclease.
   112. The method of embodiment 111, wherein the nuclease is the napDNAbp, is provided as a fusion domain of napDNAbp, or is provided in trans.
   113. The method of embodiment 93, wherein the step of forming an exposed 3′ end in the DNA strand at the target locus comprises contacting the DNA strand with a chemical agent.
   114. The method of embodiment 93, wherein the step of forming an exposed 3′ end in the DNA strand at the target locus comprises introducing a replication error.
   115. The method of embodiment 93, wherein the step of contacting the DNA molecule with the napDNAbp and the guide RNA forms an R-loop.
   116. The method of embodiment 115, wherein the DNA strand in which the exposed 3′ end is formed is in the R-loop.
   117. The method of embodiment 93, wherein guide RNA comprises an extended portion that comprises the reverse transcriptase (RT) template sequence.
   118. The method of embodiment 117, wherein the extended portion is at the 3′ end of the guide RNA, the 5′ end of the guide RNA, or at an intramolecular position in the guide RNA.
   119. The method of embodiment 93, wherein the guide RNA further comprises a primer binding site.
   120. The method of embodiment 93, wherein the guide RNA further comprises a spacer sequence.
   121. The method of embodiment 93, wherein the RT template sequence is homologous to the corresponding endogenous DNA.
   122. A method for introducing one or more changes in the nucleotide sequence of a DNA molecule at a target locus by target-primed reverse transcription, the method comprising: (a) contacting the DNA molecule at the target locus with a (i) fusion protein comprising a nucleic acid programmable DNA binding protein (napDNAbp) and a reverse transcriptase and (ii) a guide RNA comprising an RT template comprising a desired nucleotide change; (b) conducting target-primed reverse transcription of the RT template to generate a single strand DNA comprising the desired nucleotide change; and (c) incorporating the desired nucleotide change into the DNA molecule at the target locus through a DNA repair and/or replication process.
   123. The method of embodiment 122, wherein the RT template is located at the 3′ end of the guide RNA, the 5′ end of the guide RNA, or at an intramolecular location in the guide RNA.
   124. The method of embodiment 122, wherein the desired nucleotide change comprises a transition, a transversion, an insertion, or a deletion, or any combination thereof.
   125. The method of claim 122, wherein the desired nucleotide change comprises a transition selected from the group consisting of: (a) T to C; (b) A to G; (c) C to T; and (d) G to A.
   126. The method of claim 122, wherein the desired nucleotide change comprises a transversion selected from the group consisting of: (a) T to A; (b) T to G; (c) C to G; (d) C to A; (e) A to T; (f) A to C; (g) G to C; and (h) G to T.
   127. The method of embodiment 122, wherein the desired nucleotide change comprises changing (1) a G:C basepair to a T:A basepair, (2) a G:C basepair to an A:T basepair, (3) a G:C basepair to C:G basepair, (4) a T:A basepair to a G:C basepair, (5) a T:A basepair to an A:T basepair, (6) a T:A basepair to a C:G basepair, (7) a C:G basepair to a G:C basepair, (8) a C:G basepair to a T:A basepair, (9) a C:G basepair to an A:T basepair, (10) an A:T basepair to a T:A basepair, (11) an A:T basepair to a G:C basepair, or (12) an A:T basepair to a C:G basepair.
   128. A polynucleotide encoding the extended guide RNA of any one of embodiments 31-47.
   129. A vector comprising the polynucleotide of embodiment 128.
   130. A cell comprising the vector of embodiment 129.
   131. The fusion protein of any of embodiments 1-30, wherein the reverse transcriptase is an error-prone reverse transcriptase.
   132. A method for mutagenizing a DNA molecule at a target locus by target-primed reverse transcription, the method comprising: (a) contacting the DNA molecule at the target locus with a (i) fusion protein comprising a nucleic acid programmable DNA binding protein (napDNAbp) and an error-prone reverse transcriptase and (ii) a guide RNA comprising an RT template comprising a desired nucleotide change; (b) conducting target-primed reverse transcription of the RT template to generate a mutagenized single strand DNA; and (c) incorporating the mutagenized single strand DNA into the DNA molecule at the target locus through a DNA repair and/or replication process.
   133. The method of embodiment 132, wherein the fusion protein comprises the amino acid sequence of PE1, PE2, or PE3.
   134. The method of embodiment 132, wherein the napDNAbp is a Cas9 nickase (nCas9).
   135. The method of embodiment 132, wherein the napDNAbp comprises the amino acid sequence of SEQ ID NOs: 18-88, 126, 130, 137, 141, 147, 153, 157, 445, 460, 467, and 482-487.
   136. The method of embodiment 132, wherein the guide RNA comprises SEQ ID NO: 222.
   137. The method of embodiment 132, wherein the step of (b) conducting target-primed reverse transcription comprises generating a 3′ end primer binding sequence at the target locus that is capable of priming reverse transcription by annealing to a primer binding site on the guide RNA.
   138. A method for replacing a trinucleotide repeat expansion mutation in a target DNA molecule with a healthy sequence comprising a healthy number of repeat trinucleotides, the method comprising: (a) contacting the DNA molecule at the target locus with a (i) fusion protein comprising a nucleic acid programmable DNA binding protein (napDNAbp) and a reverse transcriptase and (ii) a guide RNA comprising an RT template comprising the replacement sequence, wherein said fusion protein intr; (b) conducting target-primed reverse transcription of the RT template to generate a single strand DNA comprising the replacement sequence; and (c) incorporating the single strand DNA into the DNA molecule at the target locus through a DNA repair and/or replication process.
   139. The method of embodiment 138, wherein the fusion protein comprises the amino acid sequence of PE1, PE2, or PE3.
   140. The method of embodiment 138, wherein the napDNAbp is a Cas9 nickase (nCas9).
   141. The method of embodiment 138, wherein the napDNAbp comprises the amino acid sequence of SEQ ID NOs: 18-88, 126, 130, 137, 141, 147, 153, 157, 445, 460, 467, and 482-487.
   142. The method of embodiment 138, wherein the guide RNA comprises SEQ ID NO: 222.
   143. The method of embodiment 138, wherein the step of (b) conducting target-primed reverse transcription comprises generating a 3′ end primer binding sequence at the target locus that is capable of priming reverse transcription by annealing to a primer binding site on the guide RNA.
   144. The method of embodiment 138, wherein the trinucleotide repeat expansion mutation is associated with Huntington's Disease, Fragile X syndrome, or Friedreich's ataxia.
   145. The method of embodiment 138, wherein the trinucleotide repeat expansion mutation comprises a repeating unit of CAG triplets.
   146. The method of embodiment 138, wherein the trinucleotide repeat expansion mutation comprises a repeating unit of GAA triplets.
   147. A method of installing a functional moiety in a protein of interest encoded by a target nucleotide sequence by prime editing, the method comprising: (a) contacting the target nucleotide sequence with a (i) prime editor comprising a nucleic acid programmable DNA binding protein (napDNAbp) and a reverse transcriptase and (ii) a PEgRNA comprising an edit template encoding the functional moiety; (b) polymerizing a single strand DNA sequence encoding the functional moiety; and (c) incorporating the single strand DNA sequence in place of a corresponding endogenous strand at the target nucleotide sequence through a DNA repair and/or replication process, wherein the method produces a recombinant target nucleotide sequence that encodes a fusion protein comprising the protein of interest and the functional moiety.
   148. The method of embodiment 147, wherein functional moiety is peptide tag.
   149. The method of embodiment 148, wherein the peptide tag is an affinity tag, solubilization tag, chromatography tag, epitope tag, or a fluorescence tag.
   150. The method of embodiment 148, wherein the peptide tag is selected from the group consisting of: AviTag (SEQ ID NO: 245); C-tag (SEQ ID NO: 246); Calmodulin-tag (SEQ ID NO: 247); polyglutamate tag (SEQ ID NO: 248); E-tag (SEQ ID NO: 249); FLAG-tag (SEQ ID NO: 250); HA-tag (SEQ ID NO: 251); His-tag (SEQ ID NOs: 252-262); Myc-tag (SEQ ID NO: 263); NE-tag (SEQ ID NO: 264); Rho1D4-tag (SEQ ID NO: 265); S-tag (SEQ ID NO: 266); SBP-tag (SEQ ID NO: 267); Softag-1 (SEQ ID NO: 268); Softag-2 (SEQ ID NO: 269); Spot-tag (SEQ ID NO: 270); Strep-tag (SEQ ID NO: 271); TC tag (SEQ ID NO: 272); Ty tag (SEQ ID NO: 273); V5 tag (SEQ ID NO: 274); VSV-tag (SEQ ID NO: 275); and Xpress tag (SEQ ID NO: 276).
   151. The method of embodiment 148, wherein the peptide tag is selected from the group consisting of: AU1 epitope (SEQ ID NO: 278); AU5 epitope (SEQ ID NO: 279); Bacteriophage T7 epitope (T7-tag) (SEQ ID NO: 280); Bluetongue virus tag (B-tag) (SEQ ID NO: 281); E2 epitope (SEQ ID NO: 282); Histidine affinity tag (HAT) (SEQ ID NO: 283); HSV epitope (SEQ ID NO: 284); Polyarginine (Arg-tag) (SEQ ID NO: 285); Polyaspartate (Asp-tag) (SEQ ID NO: 286); Polyphenylalanine (Phe-tag) (SEQ ID NO: 287); S1-tag (SEQ ID NO: 288); S-tag (SEQ ID NO: 289); and VSV-G (SEQ ID NO: 290).
   152. The method of embodiment 147, wherein the functional moiety is an immunoepitope.
   153. The method of embodiment 152, wherein the immunoepitope is selected from the group consisting of: tetanus toxoid (SEQ ID NO: 396); diphtheria toxin mutant CRM197 (SEQ ID NO: 398); mumps immunoepitope 1 (SEQ ID NO: 400); mumps immunoepitope 2 (SEQ ID NO: 402); mumps immunoeptitope 3 (SEQ ID NO: 404); rubella virus (SEQ ID NO: 406); hemagglutinin (SEQ ID NO: 408); neuraminidase (SEQ ID NO: 410); TAP1 (SEQ ID NO: 412); TAP2 (SEQ ID NO: 414); hemagglutinin epitopes toward class I HLA (SEQ ID NO: 416); neuraminidase epitopes toward class I HLA (SEQ ID NO: 418); hemagglutinin epitopes toward class II HLA (SEQ ID NO: 420); neuraminidase epitopes toward class II HLA (SEQ ID NO: 422); hemagglutinin epitope H5N1-bound class I and class II HLA (SEQ ID NO: 424); neuraminidase epitope H5N1-bound class I and class II HLA (SEQ ID NO: 426).
   154. The method of embodiment 147, wherein the functional moiety alters the localization of the protein of interest.
   155. The method of embodiment 147, wherein the functional moiety is a degradation tag such that the degradation rate of the protein of interest is altered.
   156. The method of embodiment 155, wherein the degradation tag comprises an amino acid sequence encoding the degradation tags as disclosed herein.
   157. The method of embodiment 147, wherein the functional moiety is a small molecule binding domain.
   158. The method of embodiment 157, wherein the small molecule binding domain is FKBP12 of SEQ ID NO: 488.
   159. The method of embodiment 157, wherein the small molecule binding domain is FKBP12-F36V of SEQ ID NO: 489.
   160. The method of embodiment 157, wherein the small molecule binding domain is cyclophilin of SEQ ID NOs: 490 and 493-494.
   161. The method of embodiment 157, wherein the small molecule binding domain is installed in two or more proteins of interest.
   162. The method of embodiment 161, wherein the two or more proteins of interest may dimerize upon contacting with a small molecule.
   163. The method of embodiment 157, wherein the small molecule is a dimer of a small molecule selected from the group consisting of:

[chemical structure]

164. A method of installing an immunoepitope in a protein of interest encoded by a target nucleotide sequence by prime editing, the method comprising: (a) contacting the target nucleotide sequence with a (i) prime editor comprising a nucleic acid programmable DNA binding protein (napDNAbp) and a reverse transcriptase and (ii) a PEgRNA comprising an edit template encoding the functional moiety; (b) polymerizing a single strand DNA sequence encoding the immunoepitope; and (c) incorporating the single strand DNA sequence in place of a corresponding endogenous strand at the target nucleotide sequence through a DNA repair and/or replication process, wherein the method produces a recombinant target nucleotide sequence that encodes a fusion protein comprising the protein of interest and the immunoepitope.
165. The method of embodiment 164, wherein the immunoepitope is selected from the group consisting of: tetanus toxoid (SEQ ID NO: 396); diphtheria toxin mutant CRM197 (SEQ ID NO: 398); mumps immunoepitope 1 (SEQ ID NO: 400); mumps immunoepitope 2 (SEQ ID NO: 402); mumps immunoeptitope 3 (SEQ ID NO: 404); rubella virus (SEQ ID NO: 406); hemagglutinin (SEQ ID NO: 408); neuraminidase (SEQ ID NO: 410); TAP1 (SEQ ID NO: 412); TAP2 (SEQ ID NO: 414); hemagglutinin epitopes toward class I HLA (SEQ ID NO: 416); neuraminidase epitopes toward class I HLA (SEQ ID NO: 418); hemagglutinin epitopes toward class II HLA (SEQ ID NO: 420); neuraminidase epitopes toward class II HLA (SEQ ID NO: 422); hemagglutinin epitope H5N1-bound class I and class II HLA (SEQ ID NO: 424); neuraminidase epitope H5N1-bound class I and class II HLA (SEQ ID NO: 426).
166. The method of embodiment 164, wherein the fusion protein comprises the amino acid sequence of PE1, PE2, or PE3.
167. The method of embodiment 164, wherein the napDNAbp is a Cas9 nickase (nCas9).
168. The method of embodiment 164, wherein the napDNAbp comprises the amino acid sequence of SEQ ID NOs: 18-88, 126, 130, 137, 141, 147, 153, 157, 445, 460, 467, and 482-487.
169. The method of embodiment 164, wherein the guide RNA comprises SEQ ID NO: 222.
170. A method of installing a small molecule dimerization domain in a protein of interest encoded by a target nucleotide sequence by prime editing, the method comprising: (a) contacting the target nucleotide sequence with a (i) prime editor comprising a nucleic acid programmable DNA binding protein (napDNAbp) and a reverse transcriptase and (ii) a PEgRNA comprising an edit template encoding the small molecule dimerization domain; (b) polymerizing a single strand DNA sequence encoding the immunoepitope; and (c) incorporating the single strand DNA sequence in place of a corresponding endogenous strand at the target nucleotide sequence through a DNA repair and/or replication process, wherein the method produces a recombinant target nucleotide sequence that encodes a fusion protein comprising the protein of interest and the small molecule dimerization domain.
171. The method of embodiment 170, further comprising conducting the method on a second protein of interest.
172. The method of embodiment 171, wherein the first protein of interest and the second protein of interest dimerize in the presence of a small molecule that binds to the dimerization domain on each of said proteins.
173. The method of embodiment 170, wherein the small molecule binding domain is FKBP12 of SEQ ID NO: 488.
174. The method of embodiment 170, wherein the small molecule binding domain is FKBP12-F36V of SEQ ID NO: 489.
175. The method of embodiment 170, wherein the small molecule binding domain is cyclophilin of SEQ ID NOs: 490 and 493-494.
176. The method of embodiment 170, wherein the small molecule is a dimer of a small molecule selected from the group consisting of:

[chemical structure]

177. The method of embodiment 170, wherein the fusion protein comprises the amino acid sequence of PE1, PE2, or PE3.
178. The method of embodiment 170, wherein the napDNAbp is a Cas9 nickase (nCas9).
179. The method of embodiment 170, wherein the napDNAbp comprises the amino acid sequence of SEQ ID NOs: 18-88, 126, 130, 137, 141, 147, 153, 157, 445, 460, 467, and 482-487.
180. The method of embodiment 170, wherein the guide RNA comprises SEQ ID NO: 222.
181. A method of installing a peptide tag or epitope onto a protein using prime editing, comprising: contacting a target nucleotide sequence encoding the protein with a prime editor construct configured to insert therein a second nucleotide sequence encoding the peptide tag to result in a recombinant nucleotide sequence, such that the peptide tag and the protein are expressed from the recombinant nucleotide sequence as a fusion protein.
182. The method of embodiment 181, wherein the peptide tag is used for purification and/or detection of the protein.
183. The method of embodiment 181, wherein the peptide tag is a poly-histidine (e.g., HHHHHH (SEQ ID NO: 252-262), FLAG (e.g., DYKDDDDK (SEQ ID NO: 2)), V5 (e.g., GKPIPNPLLGLDST (SEQ ID NO: 3)), GCN4, HA (e.g., YPYDVPDYA (SEQ ID NO: 5)), Myc (e.g. EQKLISEED (SEQ ID NO: 6)), GST . . . etc.
184. The method of embodiment 181, wherein the peptide tag has an amino acid sequence selected from the group consisting of SEQ ID NO: 245-290.
185. The method of embodiment 181, wherein the peptide tag is fused to the protein by a linker.
186. The method of embodiment 181, wherein the fusion protein has the following structure: [protein]-[peptide tag] or [peptide tag]-[protein], wherein “]-[” represents an optional linker.
187. The method of embodiment 181, wherein the linker has an amino acid sequence of SEQ ID NO: 127, 165-176, 446, 453, and 767-769.
188. The method of embodiment 181, wherein the prime editor construct comprises a PEgRNA comprising the nucleotide sequence of SEQ ID NOs: 18-101-104, 181-183, 223-234, 237-244, 277, 324-330, 332, 334, 336, 338, 340, 342, 344, 346, 348, 350, 352, 354, 356, 358, 360, 362, 364, 366, 368, 394, 429-442, 499-505, 641-649, 678-692, 735-736, 757-761, 776-777, 2997-3103, 3113-3121, 3305-3455, 3479-3493, 3522-3540, 3549-3556, 3628-3698, 3755-3810, 3874, 3890-3901, 3905-3911, 3913-3929, 3972-3989.
189. The method of embodiment 181, wherein the PEgRNA comprises a spacer, a gRNA core, and an extension arm, wherein the spacer is complementary to the target nucleotide sequence and the extension arm comprises a reverse transcriptase template that encodes the peptide tag.
190. The method of embodiment 181, wherein the PEgRNA comprises a spacer, a gRNA core, and an extension arm, wherein the spacer is complementary to the target nucleotide sequence and the extension arm comprises a reverse transcriptase template that encodes the peptide tag.
191. A method of preventing or halting the progression of a prion disease by installing on or more protective mutations into PRNP encoded by a target nucleotide sequence by prime editing, the method comprising: (a) contacting the target nucleotide sequence with a (i) prime editor comprising a nucleic acid programmable DNA binding protein (napDNAbp) and a reverse transcriptase and (ii) a PEgRNA comprising an edit template encoding the functional moiety; (b) polymerizing a single strand DNA sequence encoding the protective mutation; and (c) incorporating the single strand DNA sequence in place of a corresponding endogenous strand at the target nucleotide sequence through a DNA repair and/or replication process, wherein the method produces a recombinant target nucleotide sequence that encodes a PRNP comprising a protective mutation and which is resistant to misfolding.
192. The method of embodiment 191, wherein the prion disease is a human prion disease.
193. The method of embodiment 191, wherein the prion disease is an animal prion disease.
194. The method of embodiment 192, wherein the prion disease is Creutzfeldt-Jakob Disease (CJD), Variant Creutzfeldt-Jakob Disease (vCJD), Gerstmann-Straussler-Scheinker Syndrome, Fatal Familial Insomnia, or Kuru.
195. The method of embodiment 193, wherein the prion disease is Bovine Spongiform Encephalopathy (BSE or “mad cow disease”), Chronic Wasting Disease (CWD), Scrapie, Transmissible Mink Encephalopathy, Feline Spongiform Encephalopathy, and Ungulate Spongiform Encephalopathy.
196. The method of embodiment 191, wherein the wildtype PRNP amino acid sequence is SEQ ID NOs: 291-292.
197. The method of embodiment 191, wherein the method results in a modified PRNP amino acid sequence selected from the group consisting of SEQ ID NOs: 293-323, wherein said modified PRNP protein is resistant to misfolding.
198. The method of embodiment 191, wherein the fusion protein comprises the amino acid sequence of PE1, PE2, or PE3.
199. The method of embodiment 191, wherein the napDNAbp is a Cas9 nickase (nCas9).
200. The method of embodiment 191, wherein the napDNAbp comprises the amino acid sequence of SEQ ID NOs: 18-88, 126, 130, 137, 141, 147, 153, 157, 445, 460, 467, and 482-487.
201. The method of embodiment 191, wherein the guide RNA comprises SEQ ID NO: 222.
202. A method of installing a ribonucleotide motif or tag in an RNA of interest encoded by a target nucleotide sequence by prime editing, the method comprising: (a) contacting the target nucleotide sequence with a (i) prime editor comprising a nucleic acid programmable DNA binding protein (napDNAbp) and a reverse transcriptase and (ii) a PEgRNA comprising an edit template encoding the ribonucleotide motif or tag; (b) polymerizing a single strand DNA sequence encoding the ribonucleotide motif or tag; and (c) incorporating the single strand DNA sequence in place of a corresponding endogenous strand at the target nucleotide sequence through a DNA repair and/or replication process, wherein the method produces a recombinant target nucleotide sequence that encodes a modified RNA of interest comprising the ribonucleotide motif or tag.
203. The method of embodiment 202, wherein ribonucleotide motif or tag is a detection moiety.
204. The method of embodiment 202, wherein the ribonucleotide motif or tag affects the expression level of the RNA of interest.
205. The method of embodiment 202, wherein the ribonucleotide motif or tag affects the transport or subcellular location of the RNA of interest.
206. The method of embodiment 202, wherein the ribonucleotide motif or tag is selected from the group consisting of SV40 type 1, SV40 type 2, SV40 type 3, hGH, BGH, rbGlob, TK, MALAT1 ENE-mascRNA, KSHV PAN ENE, Smbox/U1 snRNA box, U1 snRNA 3′ box, tRNA-lysine, broccoli aptamer, spinach aptamer, mango aptamer, HDV ribozyme, and m6A.
207. The method of embodiment 202, wherein the PEgRNA comprises SEQ ID NOs: 101-104, 181-183, 223-234, 237-244, 277, 324-330, 332, 334, 336, 338, 340, 342, 344, 346, 348, 350, 352, 354, 356, 358, 360, 362, 364, 366, 368, 394, 429-442, 499-505, 641-649, 678-692, 735-736, 757-761, 776-777, 2997-3103, 3113-3121, 3305-3455, 3479-3493, 3522-3540, 3549-3556, 3628-3698, 3755-3810, 3874, 3890-3901, 3905-3911, 3913-3929, 3972-3989.
208. The method of embodiment 202, wherein the fusion protein comprises the amino acid sequence of PE1, PE2, or PE3.
209. The method of embodiment 202, wherein the napDNAbp is a Cas9 nickase (nCas9).
210. The method of embodiment 202, wherein the napDNAbp comprises the amino acid sequence of SEQ ID NOs: 18-88, 126, 130, 137, 141, 147, 153, 157, 445, 460, 467, and 482-487.
211. A method of installing or deleting a functional moiety in a protein of interest encoded by a target nucleotide sequence by prime editing, the method comprising: (a) contacting the target nucleotide sequence with a (i) prime editor comprising a nucleic acid programmable DNA binding protein (napDNAbp) and a reverse transcriptase and (ii) a PEgRNA comprising an edit template encoding the functional moiety or deletion of same; (b) polymerizing a single strand DNA sequence encoding the functional moiety or deletion of same; and (c) incorporating the single strand DNA sequence in place of a corresponding endogenous strand at the target nucleotide sequence through a DNA repair and/or replication process, wherein the method produces a recombinant target nucleotide sequence that encodes a modified protein comprising the protein of interest and the functional moiety or the removal of same, wherein the functional moiety alters a modification state or localization state of the protein.
212. The method of embodiment 211, wherein functional moiety alters the phosphorylation, ubiquitylation, glycosylation, lipidation, hydroxylation, methylation, acetylation, crotonylation, SUMOylation state of the protein of interest.

### Group 2. Embodiments 213-424

[2024] 213. A fusion protein comprising a nucleic acid programmable DNA binding protein (napDNAbp) and a polymerase.
214. The fusion protein of embodiment 213, wherein the fusion protein is capable of carrying out prime editing in the presence of an prime editing guide RNA (PEgRNA).
215. The fusion protein of embodiment 213, wherein the napDNAbp has a nickase activity.
216. The fusion protein of embodiment 213, wherein the napDNAbp is a Cas9 protein or variant thereof.
217. The fusion protein of embodiment 213, wherein the napDNAbp is a nuclease active Cas9, a nuclease inactive Cas9 (dCas9), or a Cas9 nickase (nCas9).
218. The fusion protein of embodiment 213, wherein the napDNAbp is Cas9 nickase (nCas9).
219. The fusion protein of embodiment 213, wherein the napDNAbp is selected from the group consisting of: Cas9, Cas12e, Cas12d, Cas12a, Cas12b1, Cas13a, Cas12c, and Argonaute and optionally has a nickase activity.
220. The fusion protein of embodiment 213, wherein the fusion protein when complexed with a PEgRNA is capable of binding to a target DNA sequence.
221. The fusion protein of embodiment 220, wherein the target DNA sequence comprises a target strand and a complementary non-target strand.
222. The fusion protein of embodiment 220, wherein the binding of the fusion protein complexed to the PEgRNA forms an R-loop.
223. The fusion protein of embodiment 222, wherein the R-loop comprises (i) an RNA-DNA hybrid comprising the PEgRNA and the target strand, and (ii) the complementary non-target strand.
224. The fusion protein of embodiment 223, wherein the complementary non-target strand is nicked to form a priming sequence having a free 3′ end.
225. The fusion protein of embodiment 214, wherein the PEgRNA comprises (a) a guide RNA and (b) an extension arm at the 5′ or the 3′ end of the guide RNA, or at an intramolecular location in the guide RNA.
226. The fusion protein of embodiment 225, wherein the extension arm comprises (i) a DNA synthesis template sequence comprising a desired nucleotide change, and (ii) a primer binding site.
227. The fusion protein of embodiment 226, wherein the DNA synthesis template sequence encodes a single-strand DNA flap that is complementary to an endogenous DNA sequence adjacent to the nick site, wherein the single-strand DNA flap comprises the desired nucleotide change.
228. The fusion protein of embodiment 225, wherein the extension arm is at least 5 nucleotides, at least 6 nucleotides, at least 7 nucleotides, at least 8 nucleotides, at least 9 nucleotides, at least 10 nucleotides, at least 11 nucleotides, at least 12 nucleotides, at least 13 nucleotides, at least 14 nucleotides, at least 15 nucleotides, at least 16 nucleotides, at least 17 nucleotides, at least 18 nucleotides, at least 19 nucleotides, at least 20 nucleotides, at least 21 nucleotides, at least 22 nucleotides, at least 23 nucleotides, at least 24 nucleotides, or at least 25 nucleotides in length.
229. The fusion protein of embodiment 227, wherein the single-strand DNA flap hybridizes to the endogenous DNA sequence adjacent to the nick site, thereby installing the desired nucleotide change.
230. The fusion protein of embodiment 227, wherein the single-stranded DNA flap displaces the endogenous DNA sequence adjacent to the nick site and which has a free 5′ end.
231. The fusion protein of embodiment 230, wherein the endogenous DNA sequence having the 5′ end is excised by the cell.
232. The fusion protein of embodiment 230, wherein cellular repair of the single-strand DNA flap results in installation of the desired nucleotide change, thereby forming a desired product.
233. The fusion protein of embodiment 226, wherein the desired nucleotide change is installed in an editing window that is between about −4 to +10 of the PAM sequence, or between about −10 to +20 of the PAM sequence, or between about −20 to +40 of the PAM sequence, or between about −30 to +100 of the PAM sequence, or wherein the desired nucleotide change is installed at least 1, 2, 3, 4, 5, 6, 7, 8, 9, 10, 11, 12, 13, 14, 15, 16, 17, 18, 19, 20, 21, 22, 23, 24, 25, 26, 27, 28, 29, 30, 31, 32, 33, 34, 35, 36, 37, 38, 39, 40, 41, 42, 43, 44, 45, 46, 47, 48, 49, 50, 51, 52, 53, 54, 55, 56, 57, 58, 59, 60, 61, 62, 63, 64, 65, 66, 67, 68, 69, 70, 71, 72, 73, 74, 75, 76, 77, 78, 79, 80, 81, 82, 83, 84, 85, 86, 87, 88, 89, 90, 91, 92, 93, 94, 95, 96, 97, 98, 99, or 100 nucleotides downstream of the nick site.
234. The fusion protein of embodiment 213, wherein the napDNAbp comprises an amino acid sequence of SEQ ID NO: 18, or an amino acid sequence having at least 80%, 85%, 90%, 95%, 98%, or 99% sequence identity with the amino acid sequence to SEQ ID NO: 18.
235. The fusion protein of embodiment 213, wherein the napDNAbp comprises an amino acid sequence having at least 80%, 85%, 90%, 95%, 98%, or 99% sequence identity with the amino acid sequence of any one of SEQ ID NOs: 18-88, 126, 130, 137, 141, 147, 153, 157, 445, 460, 467, and 482-487.
236. The fusion protein of embodiment 213, wherein the polymerase is a reverse transcriptase comprising any one of the amino acid sequences of SEQ ID NOs: 89-100, 105-122, 128-129, 132, 139, 143, 149, 154, 159, 235, 454, 471, 516, 662, 700, 701-716, 739-741, and 766.
237. The fusion protein of embodiment 213, wherein the polymerase is a reverse transcriptase comprising an amino acid sequence having at least 80%, 85%, 90%, 95%, 98%, or 99% sequence identity with the amino acid sequence of any one of SEQ ID NOs: 89-100, 105-122, 128-129, 132, 139, 143, 149, 154, 159, 235, 454, 471, 516, 662, 700, 701-716, 739-741, and 766.
238. The fusion protein of embodiment 213, wherein the polymerase is a naturally-occurring reverse transcriptase from a retrovirus or a retrotransposon.
239. The fusion protein of any one of the previous embodiments, wherein the fusion protein comprises the structure NH₂-[napDNAbp]-[polymerase]-COOH; or NH₂-[polymerase]-[napDNAbp]-COOH, wherein each instance of “]-[” indicates the presence of an optional linker sequence.
240. The fusion protein of embodiment 239, wherein the linker sequence comprises an amino acid sequence of SEQ ID NOs: 127, 165-176, 446, 453, and 767-769.
241. The fusion protein of embodiment 226, wherein the desired nucleotide change is a single nucleotide change, an insertion of one or more nucleotides, or a deletion of one or more nucleotides.
242. The fusion protein of embodiment 241, wherein the insert or deletion is at least 1, at least 2, at least 3, at least 4, at least 5, at least 6, at least 7, at least 8, at least 9, at least 10, at least 11, at least 12, at least 13, at least 14, at least 15, at least 16, at least 17, at least 18, at least 19, at least 20, at least 21, at least 22, at least 23, at least 24, at least 25, at least 26, at least 27, at least 28, at least 29, at least 30, at least 31, at least 32, at least 33, at least 34, at least 35, at least 36, at least 37, at least 38, at least 39, at least 40, at least 41, at least 42, at least 43, at least 44, at least 45, at least 46, at least 47, at least 48, at least 49, or at least 50.
243. A PEgRNA comprising a guide RNA and at least one nucleic acid extension arm comprising a DNA synthesis template.
244. The PEgRNA of embodiment 241, wherein the nucleic acid extension arm is position at the 3′ or 5′ end of the guide RNA, or at an intramolecular position in the guide RNA, and wherein the nucleic acid extension arm is DNA or RNA.
245. The PEgRNA of embodiment 242, wherein the PEgRNA is capable of binding to a napDNAbp and directing the napDNAbp to a target DNA sequence.
246. The PEgRNA of embodiment 245, wherein the target DNA sequence comprises a target strand and a complementary non-target strand, wherein the guide RNA hybridizes to the target strand to form an RNA-DNA hybrid and an R-loop.
247. The PEgRNA of embodiment 243, wherein the at least one nucleic acid extension arm comprises (i) a DNA synthesis template, and (ii) a primer binding site.
248. The PEgRNA of embodiment 247, wherein the nucleic acid extension arm is at least 5 nucleotides, at least 6 nucleotides, at least 7 nucleotides, at least 8 nucleotides, at least 9 nucleotides, at least 10 nucleotides, at least 11 nucleotides, at least 12 nucleotides, at least 13 nucleotides, at least 14 nucleotides, at least 15 nucleotides, at least 16 nucleotides, at least 17 nucleotides, at least 18 nucleotides, at least 19 nucleotides, at least 20 nucleotides, at least 21 nucleotides, at least 22 nucleotides, at least 23 nucleotides, at least 24 nucleotides, or at least 25 nucleotides in length.
249. The PEgRNA of embodiment 247, wherein the DNA synthesis template is at least 3 nucleotides, at least 4 nucleotides, at least 5 nucleotides, at least 6 nucleotides, at least 7 nucleotides, at least 8 nucleotides, at least 9 nucleotides, at least 10 nucleotides, at least 11 nucleotides, at least 12 nucleotides, at least 13 nucleotides, at least 14 nucleotides, or at least 15 nucleotides in length.
250. The PEgRNA of embodiment 247, wherein the primer binding site is at least 3 nucleotides, at least 4 nucleotides, at least 5 nucleotides, at least 6 nucleotides, at least 7 nucleotides, at least 8 nucleotides, at least 9 nucleotides, at least 10 nucleotides, at least 11 nucleotides, at least 12 nucleotides, at least 13 nucleotides, at least 14 nucleotides, or at least 15 nucleotides in length.
251. The PEgRNA of embodiment 243, further comprising at least one additional structure selected from the group consisting of a linker, a stem loop, a hairpin, a toeloop, an aptamer, or an RNA-protein recruitment domain.
252. The PEgRNA of embodiment 247, wherein the DNA synthesis template encodes a single-strand DNA flap that is complementary to an endogenous DNA sequence adjacent to a nick site, wherein the single-strand DNA flap comprises a desired nucleotide change.
253. The PEgRNA of embodiment 252, wherein the single-stranded DNA flap displaces an endogenous single-strand DNA having a 5′ end in the target DNA sequence that has been nicked, and wherein the endogenous single-strand DNA is immediately adjacent downstream of the nick site.
254. The PEgRNA of embodiment 253, wherein the endogenous single-stranded DNA having the free 5′ end is excised by the cell.
255. The PEgRNA of embodiment 253, wherein cellular repair of the single-strand DNA flap results in installation of the desired nucleotide change, thereby forming a desired product.
256. The PEgRNA of embodiment 243, comprising the nucleotide sequence of SEQ ID NOs: 18-36, or a nucleotide sequence having at least 85%, or at least 90%, or at least 95%, or at least 98%, or at least 99% sequence identity with any one of SEQ ID NOs: 101-104, 181-183, 223-234, 237-244, 277, 324-330, 332, 334, 336, 338, 340, 342, 344, 346, 348, 350, 352, 354, 356, 358, 360, 362, 364, 366, 368, 394, 429-442, 499-505, 641-649, 678-692, 735-736, 757-761, 776-777, 2997-3103, 3113-3121, 3305-3455, 3479-3493, 3522-3540, 3549-3556, 3628-3698, 3755-3810, 3874, 3890-3901, 3905-3911, 3913-3929, 3972-3989.
257. The PEgRNA of embodiment 247, wherein the DNA synthesis template comprises a nucleotide sequence that is at least 80%, or 85%, or 90%, or 95%, or 99% identical to the endogenous DNA target.
258. The PEgRNA of embodiment 247, wherein the primer binding site hybridizes with a free 3′ end of the cut DNA.
259. The PEgRNA of embodiment 251, wherein the at least one additional structure is located at the 3′ or 5′ end of the PEgRNA.
260. A complex comprising a fusion protein of any one of embodiments 213-242 and an PEgRNA.
261. The complex of embodiment 260, wherein the PEgRNA comprises a guide RNA and an nucleic acid extension arm at the 3′ or 5′ end of the guide RNA or at an intramolecular position in the guide RNA.
262. The complex of embodiment 260, wherein the PEgRNA is capable of binding to a napDNAbp and directing the napDNAbp to a target DNA sequence.
263. The complex of embodiment 262, wherein the target DNA sequence comprises a target strand and a complementary non-target strand, wherein the guide RNA hybridizes to the target strand to form an RNA-DNA hybrid and an R-loop.
264. The complex of embodiment 261, wherein the at least one nucleic acid extension arm comprises (i) a DNA synthesis template, and (ii) a primer binding site.
265. The complex of embodiment 260, wherein the PEgRNA comprises the nucleotide sequence of SEQ ID NOs: 101-104, 181-183, 223-234, 237-244, 277, 324-330, 332, 334, 336, 338, 340, 342, 344, 346, 348, 350, 352, 354, 356, 358, 360, 362, 364, 366, 368, 394, 429-442, 499-505, 641-649, 678-692, 735-736, 757-761, 776-777, 2997-3103, 3113-3121, 3305-3455, 3479-3493, 3522-3540, 3549-3556, 3628-3698, 3755-3810, 3874, 3890-3901, 3905-3911, 3913-3929, 3972-3989, or a nucleotide sequence having at least 85%, or at least 90%, or at least 95%, or at least 98%, or at least 99% sequence identity with any one of SEQ ID NOs: 101-104, 181-183, 223-234, 237-244, 277, 324-330, 332, 334, 336, 338, 340, 342, 344, 346, 348, 350, 352, 354, 356, 358, 360, 362, 364, 366, 368, 394, 429-442, 499-505, 641-649, 678-692, 735-736, 757-761, 776-777, 2997-3103, 3113-3121, 3305-3455, 3479-3493, 3522-3540, 3549-3556, 3628-3698, 3755-3810, 3874, 3890-3901, 3905-3911, 3913-3929, 3972-3989.
266. The complex of embodiment 264, wherein the DNA synthesis template comprises a nucleotide sequence that is at least 80%, or 85%, or 90%, or 95%, or 99% identical to the endogenous DNA target.
267. The complex of embodiment 264, wherein the primer binding site hybridizes with a free 3′ end of the cut DNA.
268. A complex comprising a napDNAbp and an PEgRNA.
269. The complex of embodiment 268, wherein the napDNAbp is a Cas9 nickase.
270. The complex of embodiment 268, wherein the napDNAbp comprises an amino acid sequence of SEQ ID NO: 18.
271. The complex of embodiment 268, wherein the napDNAbp comprises an amino acid sequence having at least 80%, 85%, 90%, 95%, 98%, or 99% sequence identity with the amino acid sequence of any one of SEQ ID NOs: 18-88, 126, 130, 137, 141, 147, 153, 157, 445, 460, 467, and 482-487.
272. The complex of embodiment 268, wherein the PEgRNA comprises a guide RNA and a nucleic acid extension arm at the 3′ or 5′ end of the guide RNA, or at an intramolecular position in the guide RNA.
273. The complex of embodiment 268, wherein the PEgRNA is capable of directing the napDNAbp to a target DNA sequence.
274. The complex of embodiment 272, wherein the target DNA sequence comprises a target strand and a complementary non-target strand, wherein the spacer sequence of the PEgRNA hybridizes to the target strand to form an RNA-DNA hybrid and an R-loop.
275. The complex of embodiment 273, wherein the nucleic acid extension arm comprises (i) a DNA synthesis template, and (ii) a primer binding site.
276. The complex of embodiment 269, wherein the PEgRNA comprises the nucleotide sequence of SEQ ID NOs: 101-104, 181-183, 223-234, 237-244, 277, 324-330, 332, 334, 336, 338, 340, 342, 344, 346, 348, 350, 352, 354, 356, 358, 360, 362, 364, 366, 368, 394, 429-442, 499-505, 641-649, 678-692, 735-736, 757-761, 776-777, 2997-3103, 3113-3121, 3305-3455, 3479-3493, 3522-3540, 3549-3556, 3628-3698, 3755-3810, 3874, 3890-3901, 3905-3911, 3913-3929, 3972-3989, or a nucleotide sequence having at least 85%, or at least 90%, or at least 95%, or at least 98%, or at least 99% sequence identity with any one of SEQ ID NOs: 101-104, 181-183, 223-234, 237-244, 277, 324-330, 332, 334, 336, 338, 340, 342, 344, 346, 348, 350, 352, 354, 356, 358, 360, 362, 364, 366, 368, 394, 429-442, 499-505, 641-649, 678-692, 735-736, 757-761, 776-777, 2997-3103, 3113-3121, 3305-3455, 3479-3493, 3522-3540, 3549-3556, 3628-3698, 3755-3810, 3874, 3890-3901, 3905-3911, 3913-3929, 3972-3989.
277. The complex of embodiment 276, wherein the DNA synthesis template comprises a nucleotide sequence that is at least 80%, or 85%, or 90%, or 95%, or 99% identical to the endogenous DNA target.
278. The complex of embodiment 276, wherein the primer binding site hybridizes with a free 3′ end of the cut DNA.
279. The complex of embodiment 276, wherein the PEgRNA further comprises at least one additional structure selected from the group consisting of a linker, a stem loop, a hairpin, a toeloop, an aptamer, or an RNA-protein recruitment domain.
280. A polynucleotide encoding the fusion protein of any of embodiments 213-242.
281. A vector comprising the polynucleotide of embodiment 280.
282. A cell comprising the fusion protein of any of embodiments 213-242 and an PEgRNA bound to the napDNAbp of the fusion protein.
283. A cell comprising a complex of any one of embodiments 260-279.
284. A pharmaceutical composition comprising: (i) a fusion protein of any of embodiments 213-242, the complex of embodiments 260-279, the polynucleotide of embodiment 68, or the vector of embodiment 69; and (ii) a pharmaceutically acceptable excipient.
285. A pharmaceutical composition comprising: (i) the complex of embodiments 260-279 (ii) a polymerase provided in trans; and (iii) a pharmaceutically acceptable excipient.
286. A kit comprising a nucleic acid construct, comprising: (i) a nucleic acid sequencing encoding the fusion protein of any one of embodiments 213-242; and (ii) a promoter that drives expression of the sequence of (i).
287. A method for installing a desired nucleotide change in a double-stranded DNA sequence, the method comprising:
[2025] (i) contacting the double-stranded DNA sequence with a complex comprising a fusion protein and a PEgRNA, wherein the fusion protein comprises a napDNAbp and a polymerase and wherein the PEgRNA comprises a DNA synthesis template comprising the desired nucleotide change and a primer binding site;
[2026] (ii) nicking the double-stranded DNA sequence, thereby generating a free single-strand DNA having a 3′ end;
[2027] (iii) hybridizing the 3′ end of the free single-strand DNA to the primer binding site, thereby priming the polymerase;
[2028] (iv) polymerizing a strand of DNA from the 3′ end hybridized to the primer binding site, thereby generating a single-strand DNA flap comprising the desired nucleotide change and which is complementary to the DNA synthesis template;
[2029] (v) replacing an endogenous DNA strand adjacent the cut site with the single-strand DNA flap, thereby installing the desired nucleotide change in the double-stranded DNA sequence.
   288. The method of embodiment 287, wherein the step of (v) replacing comprises: (i) hybridizing the single-strand DNA flap to the endogenous DNA strand adjacent the cut site to create a sequence mismatch; (ii) excising the endogenous DNA strand; and (iii) repairing the mismatch to form the desired product comprising the desired nucleotide change in both strands of DNA.
   289. The method of embodiment 288, wherein the desired nucleotide change is a single nucleotide substitution, a deletion, or an insertion.
   290. The method of embodiment 289, wherein the single nucleotide substitution is a transition or a transversion.
   291. The method of embodiment 288, wherein the desired nucleotide change is (1) a G to T substitution, (2) a G to A substitution, (3) a G to C substitution, (4) a T to G substitution, (5) a T to A substitution, (6) a T to C substitution, (7) a C to G substitution, (8) a C to T substitution, (9) a C to A substitution, (10) an A to T substitution, (11) an A to G substitution, or (12) an A to C substitution.
   292. The method of embodiment 288, wherein the desired nucleoid change converts (1) a G:C basepair to a T:A basepair, (2) a G:C basepair to an A:T basepair, (3) a G:C basepair to C:G basepair, (4) a T:A basepair to a G:C basepair, (5) a T:A basepair to an A:T basepair, (6) a T:A basepair to a C:G basepair, (7) a C:G basepair to a G:C basepair, (8) a C:G basepair to a T:A basepair, a C:G basepair to an A:T basepair, (10) an A:T basepair to a T:A basepair, (11) an A:T basepair to a G:C basepair, or (12) an A:T basepair to a C:G basepair.
   293. The method of embodiment 288, wherein the desired nucleotide change is an insertion or deletion of 1, 2, 3, 4, 5, 6, 7, 8, 9, 10, 11, 12, 13, 14, 15, 16, 17, 18, 19, 20, 21, 22, 23, 24, or 25 nucleotides.
   294. The method of embodiment 288, wherein the desired nucleotide change corrects a disease-associated gene.
   295. The method of embodiment 294, wherein the disease-associated gene is associated with a monogentic disorder selected from the group consisting of: Adenosine Deaminase (ADA) Deficiency; Alpha-1 Antitrypsin Deficiency; Cystic Fibrosis; Duchenne Muscular Dystrophy; Galactosemia; Hemochromatosis; Huntington's Disease; Maple Syrup Urine Disease; Marfan Syndrome; Neurofibromatosis Type 1; Pachyonychia Congenita; Phenylkeotnuria; Severe Combined Immunodeficiency; Sickle Cell Disease; Smith-Lemli-Opitz Syndrome; a trinucleotide repeat disorder; a prion disease; and Tay-Sachs Disease.
   296. The method of embodiment 294, wherein the disease-associated gene is associated with a polygenic disorder selected from the group consisting of: heart disease; high blood pressure; Alzheimer's disease; arthritis; diabetes; cancer; and obesity.
   297. The method of embodiment 287, wherein the napDNAbp is a nuclease dead Cas9 (dCas9), a Cas9 nickase (nCas9), or a nuclease active Cas9.
   298. The method of embodiment 287, wherein the napDNAbp comprises an amino acid sequence of SEQ ID NO: 18, or an amino acid sequence having at least 80%, 85%, 90%, 95%, 98%, or 99% sequence identity with the amino acid sequence of SEQ ID NO: 18.
   299. The method of embodiment 287, wherein the napDNAbp comprises an amino acid sequence having at least 80%, 85%, 90%, 95%, 98%, or 99% sequence identity with the amino acid sequence of any one of SEQ ID NOs: 18-88, 126, 130, 137, 141, 147, 153, 157, 445, 460, 467, and 482-487.
   300. The method of embodiment 287, wherein the polymerase is a reverse transcriptase comprising any one of the amino acid sequences of SEQ ID NOs: 89-100, 105-122, 128-129, 132, 139, 143, 149, 154, 159, 235, 454, 471, 516, 662, 700, 701-716, 739-741, and 766.
   301. The method of embodiment 287, wherein the polymerase is a reverse transcriptase comprising an amino acid sequence having at least 80%, 85%, 90%, 95%, 98%, or 99% sequence identity with the amino acid sequence of any one of SEQ ID NOs: 89-100, 105-122, 128-129, 132, 139, 143, 149, 154, 159, 235, 454, 471, 516, 662, 700, 701-716, 739-741, and 766.
   302. The method of embodiment 287, wherein the PEgRNA comprises a nucleic acid extension arm at the 3′ or 5′ ends or at an intramolecular location in the guide RNA, wherein the extension arm comprises the DNA synthesis template sequence and the primer binding site.
   303. The method of embodiment 302, wherein the extension arm is at least 5 nucleotides, at least 6 nucleotides, at least 7 nucleotides, at least 8 nucleotides, at least 9 nucleotides, at least 10 nucleotides, at least 11 nucleotides, at least 12 nucleotides, at least 13 nucleotides, at least 14 nucleotides, at least 15 nucleotides, at least 16 nucleotides, at least 17 nucleotides, at least 18 nucleotides, at least 19 nucleotides, at least 20 nucleotides, at least 21 nucleotides, at least 22 nucleotides, at least 23 nucleotides, at least 24 nucleotides, or at least 25 nucleotides in length.
   304. The method of embodiment 287, wherein the PEgRNA has a nucleotide sequence selected from the group consisting of SEQ ID NOs: 101-104, 181-183, 223-234, 237-244, 277, 324-330, 332, 334, 336, 338, 340, 342, 344, 346, 348, 350, 352, 354, 356, 358, 360, 362, 364, 366, 368, 394, 429-442, 499-505, 641-649, 678-692, 735-736, 757-761, 776-777, 2997-3103, 3113-3121, 3305-3455, 3479-3493, 3522-3540, 3549-3556, 3628-3698, 3755-3810, 3874, 3890-3901, 3905-3911, 3913-3929, 3972-3989.
   305. A method for introducing one or more changes in the nucleotide sequence of a DNA molecule at a target locus, comprising:
[2030] (i) contacting the DNA molecule with a nucleic acid programmable DNA binding protein (napDNAbp) and a PEgRNA which targets the napDNAbp to the target locus, wherein the PEgRNA comprises a reverse transcriptase (RT) template sequence comprising at least one desired nucleotide change and a primer binding site;
[2031] (ii) forming an exposed 3′ end in a DNA strand at the target locus;
[2032] (iii) hybridizing the exposed 3′ end to the primer binding site to prime reverse transcription;
[2033] (iv) synthesizing a single strand DNA flap comprising the at least one desired nucleotide change based on the RT template sequence by reverse transcriptase;
[2034] (v) and incorporating the at least one desired nucleotide change into the corresponding endogenous DNA, thereby introducing one or more changes in the nucleotide sequence of the DNA molecule at the target locus.
   306. The method of embodiment 305, wherein the one or more changes in the nucleotide sequence comprises a transition.
   307. The method of embodiment 306, wherein the transition is selected from the group consisting of: (a) T to C; (b) A to G; (c) C to T; and (d) G to A.
   308. The method of embodiment 305, wherein the one or more changes in the nucleotide sequence comprises a transversion.
   309. The method of embodiment 308, wherein the transversion is selected from the group consisting of: (a) T to A; (b) T to G; (c) C to G; (d) C to A; (e) A to T; (f) A to C; (g) G to C; and (h) G to T.
   310. The method of embodiment 305, wherein the one or more changes in the nucleotide sequence comprises changing (1) a G:C basepair to a T:A basepair, (2) a G:C basepair to an A:T basepair, (3) a G:C basepair to C:G basepair, (4) a T:A basepair to a G:C basepair, (5) a T:A basepair to an A:T basepair, (6) a T:A basepair to a C:G basepair, (7) a C:G basepair to a G:C basepair, (8) a C:G basepair to a T:A basepair, (9) a C:G basepair to an A:T basepair, (9) an A:T basepair to a T:A basepair, (11) an A:T basepair to a G:C basepair, or (12) an A:T basepair to a C:G basepair.
   311. The method of embodiment 305, wherein the one or more changes in the nucleotide sequence comprises an insertion or deletion of 1, 2, 3, 4, 5, 6, 7, 8, 9, 10, 11, 12, 13, 14, 15, 16, 17, 18, 19, 20, 21, 22, 23, 24, or 25 nucleotides.
   312. The method of embodiment 305, wherein the one or more changes in the nucleotide sequence comprises a correction to a disease-associated gene.
   313. The method of embodiment 312, wherein the disease-associated gene is associated with a monogentic disorder selected from the group consisting of: Adenosine Deaminase (ADA) Deficiency; Alpha-1 Antitrypsin Deficiency; Cystic Fibrosis; Duchenne Muscular Dystrophy; Galactosemia; Hemochromatosis; Huntington's Disease; Maple Syrup Urine Disease; Marfan Syndrome; Neurofibromatosis Type 1; Pachyonychia Congenita; Phenylkeotnuria; Severe Combined Immunodeficiency; Sickle Cell Disease; Smith-Lemli-Opitz Syndrome; a trinucleotide repeat disorder; a prion disease; and Tay-Sachs Disease.
   314. The method of embodiment 312, wherein the disease-associated gene is associated with a polygenic disorder selected from the group consisting of: heart disease; high blood pressure; Alzheimer's disease; arthritis; diabetes; cancer; and obesity.
   315. The method of embodiment 305, wherein the napDNAbp is a nuclease active Cas9 or variant thereof.
   316. The method of embodiment 305, wherein the napDNAbp is a nuclease inactive Cas9 (dCas9) or Cas9 nickase (nCas9), or a variant thereof.
   317. The method of embodiment 305, wherein the napDNAbp comprises an amino acid sequence of SEQ ID NO: 18, or an amino acid sequence having at least 80%, 85%, 90%, 95%, 98%, or 99% sequence identity with SEQ ID NO: 18.
   318. The method of embodiment 305, wherein the napDNAbp comprises an amino acid sequence having at least 80%, 85%, 90%, 95%, 98%, or 99% sequence identity with the amino acid sequence of any one of SEQ ID NOs: 18-88, 126, 130, 137, 141, 147, 153, 157, 445, 460, 467, and 482-487.
   319. The method of embodiment 305, wherein the reverse transcriptase is introduced in trans.
   320. The method of embodiment 305, wherein the napDNAbp comprises a fusion to a reverse transcriptase.
   321. The method of embodiment 305, wherein the reverse transcriptase comprises any one of the amino acid sequences of SEQ ID NOs: 89-100, 105-122, 128-129, 132, 139, 143, 149, 154, 159, 235, 454, 471, 516, 662, 700, 701-716, 739-741, and 766.
   322. The method of embodiment 305, wherein the reverse transcriptase comprises an amino acid sequence having at least 80%, 85%, 90%, 95%, 98%, or 99% sequence identity with the amino acid sequence of any one of SEQ ID NOs: 89-100, 105-122, 128-129, 132, 139, 143, 149, 154, 159, 235, 454, 471, 516, 662, 700, 701-716, 739-741, and 766.
   323. The method of embodiment 305, wherein the step of forming an exposed 3′ end in the DNA strand at the target locus comprises nicking the DNA strand with a nuclease.
   324. The method of embodiment 323, wherein the nuclease is provided is provided in trans.
   325. The method of embodiment 305, wherein the step of forming an exposed 3′ end in the DNA strand at the target locus comprises contacting the DNA strand with a chemical agent.
   326. The method of embodiment 305, wherein the step of forming an exposed 3′ end in the DNA strand at the target locus comprises introducing a replication error.
   327. The method of embodiment 305, wherein the step of contacting the DNA molecule with the napDNAbp and the guide RNA forms an R-loop.
   328. The method of embodiment 327, wherein the DNA strand in which the exposed 3′ end is formed is in the R-loop.
   329. The method of embodiment 315, wherein the PEgRNA comprises an extension arm that comprises the reverse transcriptase (RT) template sequence and the primer binding site.
   330. The method of embodiment 329, wherein the extension arm is at the 3′ end of the guide RNA, the 5′ end of the guide RNA, or at an intramolecular position in the guide RNA.
   331. The method of embodiment 305, wherein the PEgRNA further comprises at least one additional structure selected from the group consisting of a linker, a stem loop, a hairpin, a toeloop, an aptamer, or an RNA-protein recruitment domain.
   332. The method of embodiment 305, wherein the PEgRNA further comprises a homology arm.
   333. The method of embodiment 305, wherein the RT template sequence is homologous to the corresponding endogenous DNA.
   334. A method for introducing one or more changes in the nucleotide sequence of a DNA molecule at a target locus by target-primed reverse transcription, the method comprising: (a) contacting the DNA molecule at the target locus with a (i) fusion protein comprising a nucleic acid programmable DNA binding protein (napDNAbp) and a reverse transcriptase and (ii) a guide RNA comprising an RT template comprising a desired nucleotide change; (b) conducting target-primed reverse transcription of the RT template to generate a single strand DNA comprising the desired nucleotide change; and (c) incorporating the desired nucleotide change into the DNA molecule at the target locus through a DNA repair and/or replication process.
   335. The method of embodiment 334, wherein the RT template is located at the 3′ end of the guide RNA, the 5′ end of the guide RNA, or at an intramolecular location in the guide RNA.
   336. The method of embodiment 334, wherein the desired nucleotide change comprises a transition, a transversion, an insertion, or a deletion, or any combination thereof.
   337. The method of embodiment 334, wherein the desired nucleotide change comprises a transition selected from the group consisting of: (a) T to C; (b) A to G; (c) C to T; and (d) G to A.
   338. The method of claim 334, wherein the desired nucleotide change comprises a transversion selected from the group consisting of: (a) T to A; (b) T to G; (c) C to G; (d) C to A; (e) A to T; (f) A to C; (g) G to C; and (h) G to T.
   339. The method of embodiment 334, wherein the desired nucleotide change comprises changing (1) a G:C basepair to a T:A basepair, (2) a G:C basepair to an A:T basepair, (3) a G:C basepair to C:G basepair, (4) a T:A basepair to a G:C basepair, (5) a T:A basepair to an A:T basepair, (6) a T:A basepair to a C:G basepair, (7) a C:G basepair to a G:C basepair, (8) a C:G basepair to a T:A basepair, (9) a C:G basepair to an A:T basepair, (10) an A:T basepair to a T:A basepair, (11) an A:T basepair to a G:C basepair, or (12) an A:T basepair to a C:G basepair.
   340. A polynucleotide encoding the PEgRNA of any one of embodiments 243-259.
   341. A vector comprising the polynucleotide of embodiment 340.
   342. A cell comprising the vector of embodiment 341.
   343. The fusion protein of embodiment 213, wherein the polymerase is an error-prone reverse transcriptase.
   344. A method for mutagenizing a DNA molecule at a target locus by target-primed reverse transcription, the method comprising: (a) contacting the DNA molecule at the target locus with a (i) fusion protein comprising a nucleic acid programmable DNA binding protein (napDNAbp) and an error-prone reverse transcriptase and (ii) a guide RNA comprising an RT template comprising a desired nucleotide change; (b) conducting target-primed reverse transcription of the RT template to generate a mutagenized single strand DNA; and (c) incorporating the mutagenized single strand DNA into the DNA molecule at the target locus through a DNA repair and/or replication process.
   345. The method of any prior embodiment, wherein the fusion protein comprises the amino acid sequence of PE1, PE2, or PE3.
   346. The method of any prior embodiment, wherein the napDNAbp is a Cas9 nickase (nCas9).
   347. The method of embodiment 344, wherein the napDNAbp comprises the amino acid sequence of SEQ ID NOs: 18-88, 126, 130, 137, 141, 147, 153, 157, 445, 460, 467, and 482-487.
   348. The method of embodiment 344, wherein the guide RNA comprises SEQ ID NO: 222.
   349. The method of embodiment 344, wherein the step of (b) conducting target-primed reverse transcription comprises generating a 3′ end primer binding sequence at the target locus that is capable of priming reverse transcription by annealing to a primer binding site on the guide RNA.
   350. A method for replacing a trinucleotide repeat expansion mutation in a target DNA molecule with a healthy sequence comprising a healthy number of repeat trinucleotides, the method comprising: (a) contacting the DNA molecule at the target locus with a (i) fusion protein comprising a nucleic acid programmable DNA binding protein (napDNAbp) and a polymerase and (ii) a PEgRNA comprising DNA synthesis template comprising the replacement sequence and a primer binding site; (b) conducting prime editing to generate a single strand DNA comprising the replacement sequence; and (c) incorporating the single strand DNA into the DNA molecule at the target locus through a DNA repair and/or replication process.
   351. The method of embodiment 350, wherein the fusion protein comprises the amino acid sequence of PE1, PE2, or PE3.
   352. The method of embodiment 350, wherein the napDNAbp is a Cas9 nickase (nCas9).
   353. The method of embodiment 350, wherein the napDNAbp comprises the amino acid sequence of SEQ ID NOs: 18-88, 126, 130, 137, 141, 147, 153, 157, 445, 460, 467, and 482-487.
   354. The method of embodiment 350, wherein the guide RNA comprises SEQ ID NO: 222.
   355. The method of embodiment 350, wherein the step of (b) conducting prime editing comprises generating a 3′ end primer binding sequence at the target locus that is capable of priming polymerase by annealing to the primer binding site on the guide RNA.
   356. The method of embodiment 350, wherein the trinucleotide repeat expansion mutation is associated with Huntington's Disease, Fragile X syndrome, or Friedreich's ataxia.
   357. The method of embodiment 350, wherein the trinucleotide repeat expansion mutation comprises a repeating unit of CAG triplets.
   358. The method of embodiment 350, wherein the trinucleotide repeat expansion mutation comprises a repeating unit of GAA triplets.
   359. A method of installing a functional moiety in a protein of interest encoded by a target nucleotide sequence by prime editing, the method comprising: (a) contacting the target nucleotide sequence with a (i) prime editor comprising a nucleic acid programmable DNA binding protein (napDNAbp) and a polymerase and (ii) a PEgRNA comprising DNA synthesis template encoding the functional moiety; (b) polymerizing a single strand DNA sequence encoding the functional moiety; and (c) incorporating the single strand DNA sequence in place of a corresponding endogenous strand at the target nucleotide sequence through a DNA repair and/or replication process, wherein the method produces a recombinant target nucleotide sequence that encodes a fusion protein comprising the protein of interest and the functional moiety.
   360. The method of embodiment 359, wherein functional moiety is peptide tag.
   361. The method of embodiment 360, wherein the peptide tag is an affinity tag, solubilization tag, chromatography tag, epitope or immunoepitope tag, or a fluorescence tag.
   362. The method of embodiment 360, wherein the peptide tag is selected from the group consisting of: AviTag (SEQ ID NO: 245); C-tag (SEQ ID NO: 246); Calmodulin-tag (SEQ ID NO: 247); polyglutamate tag (SEQ ID NO: 248); E-tag (SEQ ID NO: 249); FLAG-tag (SEQ ID NO: 250); HA-tag (SEQ ID NO: 251); His-tag (SEQ ID NOs: 252-262); Myc-tag (SEQ ID NO: 263); NE-tag (SEQ ID NO: 264); Rho1D4-tag (SEQ ID NO: 265); S-tag (SEQ ID NO: 266); SBP-tag (SEQ ID NO: 267); Softag-1 (SEQ ID NO: 268); Softag-2 (SEQ ID NO: 269); Spot-tag (SEQ ID NO: 270); Strep-tag (SEQ ID NO: 271); TC tag (SEQ ID NO: 272); Ty tag (SEQ ID NO: 273); V5 tag (SEQ ID NO: 274); VSV-tag (SEQ ID NO: 275); and Xpress tag (SEQ ID NO: 276).
   363. The method of embodiment 360, wherein the peptide tag is selected from the group consisting of: AU1 epitope (SEQ ID NO: 278); AU5 epitope (SEQ ID NO: 279); Bacteriophage T7 epitope (T7-tag) (SEQ ID NO: 280); Bluetongue virus tag (B-tag) (SEQ ID NO: 281); E2 epitope (SEQ ID NO: 282); Histidine affinity tag (HAT) (SEQ ID NO: 283); HSV epitope (SEQ ID NO: 284); Polyarginine (Arg-tag) (SEQ ID NO: 285); Polyaspartate (Asp-tag) (SEQ ID NO: 286); Polyphenylalanine (Phe-tag) (SEQ ID NO: 287); S1-tag (SEQ ID NO: 288); S-tag (SEQ ID NO: 289); and VSV-G (SEQ ID NO: 290).
   364. The method of embodiment 359, wherein the functional moiety is an immunoepitope.
   365. The method of embodiment 364, wherein the immunoepitope is selected from the group consisting of: tetanus toxoid (SEQ ID NO: 396); diphtheria toxin mutant CRM197 (SEQ ID NO: 398); mumps immunoepitope 1 (SEQ ID NO: 400); mumps immunoepitope 2 (SEQ ID NO: 402); mumps immunoeptitope 3 (SEQ ID NO: 404); rubella virus (SEQ ID NO: 406); hemagglutinin (SEQ ID NO: 408); neuraminidase (SEQ ID NO: 410); TAP1 (SEQ ID NO: 412); TAP2 (SEQ ID NO: 414); hemagglutinin epitopes toward class I HLA (SEQ ID NO: 416); neuraminidase epitopes toward class I HLA (SEQ ID NO: 418); hemagglutinin epitopes toward class II HLA (SEQ ID NO: 420); neuraminidase epitopes toward class II HLA (SEQ ID NO: 422); hemagglutinin epitope H5N1-bound class I and class II HLA (SEQ ID NO: 424); neuraminidase epitope H5N1-bound class I and class II HLA (SEQ ID NO: 426).
   366. The method of embodiment 359, wherein the functional moiety alters the localization of the protein of interest.
   367. The method of embodiment 359, wherein the functional moiety is a degradation tag such that the degradation rate of the protein of interest is altered.
   368. The method of embodiment 367, wherein the degradation tag results in the elimination of the tagged protein.
   369. The method of embodiment 359, wherein the functional moiety is a small molecule binding domain.
   370. The method of embodiment 359, wherein the small molecule binding domain is FKBP12 of SEQ ID NO: 488.
   371. The method of embodiment 359, wherein the small molecule binding domain is FKBP12-F36V of SEQ ID NO: 489.
   372. The method of embodiment 359, wherein the small molecule binding domain is cyclophilin of SEQ ID NOs: 490 and 493-494.
   373. The method of embodiment 359, wherein the small molecule binding domain is installed in two or more proteins of interest.
   374. The method of embodiment 373, wherein the two or more proteins of interest may dimerize upon contacting with a small molecule.
   375. The method of embodiment 369, wherein the small molecule is a dimer of a small molecule selected from the group consisting of:

[chemical structure]

376. A method of installing an immunoepitope in a protein of interest encoded by a target nucleotide sequence by prime editing, the method comprising: (a) contacting the target nucleotide sequence with a (i) prime editor comprising a nucleic acid programmable DNA binding protein (napDNAbp) and a polymerase and (ii) a PEgRNA comprising an edit template encoding the functional moiety; (b) polymerizing a single strand DNA sequence encoding the immunoepitope; and (c) incorporating the single strand DNA sequence in place of a corresponding endogenous strand at the target nucleotide sequence through a DNA repair and/or replication process, wherein the method produces a recombinant target nucleotide sequence that encodes a fusion protein comprising the protein of interest and the immunoepitope.
377. The method of embodiment 376, wherein the immunoepitope is selected from the group consisting of: tetanus toxoid (SEQ ID NO: 396); diphtheria toxin mutant CRM197 (SEQ ID NO: 398); mumps immunoepitope 1 (SEQ ID NO: 400); mumps immunoepitope 2 (SEQ ID NO: 402); mumps immunoeptitope 3 (SEQ ID NO: 404); rubella virus (SEQ ID NO: 406); hemagglutinin (SEQ ID NO: 408); neuraminidase (SEQ ID NO: 410); TAP1 (SEQ ID NO: 412); TAP2 (SEQ ID NO: 414); hemagglutinin epitopes toward class I HLA (SEQ ID NO: 416); neuraminidase epitopes toward class I HLA (SEQ ID NO: 418); hemagglutinin epitopes toward class II HLA (SEQ ID NO: 420); neuraminidase epitopes toward class II HLA (SEQ ID NO: 422); hemagglutinin epitope H5N1-bound class I and class II HLA (SEQ ID NO: 424); neuraminidase epitope H5N1-bound class I and class II HLA (SEQ ID NO: 426).
378. The method of embodiment 376, wherein the fusion protein comprises the amino acid sequence of PE1, PE2, or PE3.
379. The method of embodiment 376, wherein the napDNAbp is a Cas9 nickase (nCas9).
380. The method of embodiment 376, wherein the napDNAbp comprises the amino acid sequence of SEQ ID NOs: 18-88, 126, 130, 137, 141, 147, 153, 157, 445, 460, 467, and 482-487.
381. The method of embodiment 376, wherein the PEgRNA comprises SEQ ID NOs: 101-104, 181-183, 223-234, 237-244, 277, 324-330, 332, 334, 336, 338, 340, 342, 344, 346, 348, 350, 352, 354, 356, 358, 360, 362, 364, 366, 368, 394, 429-442, 499-505, 641-649, 678-692, 735-736, 757-761, 776-777, 2997-3103, 3113-3121, 3305-3455, 3479-3493, 3522-3540, 3549-3556, 3628-3698, 3755-3810, 3874, 3890-3901, 3905-3911, 3913-3929, 3972-3989.
382. A method of installing a small molecule dimerization domain in a protein of interest encoded by a target nucleotide sequence by prime editing, the method comprising: (a) contacting the target nucleotide sequence with a (i) prime editor comprising a nucleic acid programmable DNA binding protein (napDNAbp) and a polymerase and (ii) a PEgRNA comprising an edit template encoding the small molecule dimerization domain; (b) polymerizing a single strand DNA sequence encoding the immunoepitope; and (c) incorporating the single strand DNA sequence in place of a corresponding endogenous strand at the target nucleotide sequence through a DNA repair and/or replication process, wherein the method produces a recombinant target nucleotide sequence that encodes a fusion protein comprising the protein of interest and the small molecule dimerization domain.
383. The method of embodiment 382, further comprising conducting the method on a second protein of interest.
384. The method of embodiment 383, wherein the first protein of interest and the second protein of interest dimerize in the presence of a small molecule that binds to the dimerization domain on each of said proteins.
385. The method of embodiment 382, wherein the small molecule binding domain is FKBP12 of SEQ ID NO: 488.
386. The method of embodiment 382, wherein the small molecule binding domain is FKBP12-F36V of SEQ ID NO: 489.
387. The method of embodiment 382, wherein the small molecule binding domain is cyclophilin of SEQ ID NOs: 490 and 493-494.
388. The method of embodiment 382, wherein the small molecule is a dimer of a small molecule selected from the group consisting of:

[chemical structure]

389. The method of embodiment 382, wherein the fusion protein comprises the amino acid sequence of PE1, PE2, or PE3.
390. The method of embodiment 382, wherein the napDNAbp is a Cas9 nickase (nCas9).
391. The method of embodiment 382, wherein the napDNAbp comprises the amino acid sequence of SEQ ID NOs: 18-88, 126, 130, 137, 141, 147, 153, 157, 445, 460, 467, and 482-487.
392. The method of embodiment 382, wherein the PEgRNA comprises SEQ ID NOs: 101-104, 181-183, 223-234, 237-244, 277, 324-330, 332, 334, 336, 338, 340, 342, 344, 346, 348, 350, 352, 354, 356, 358, 360, 362, 364, 366, 368, 394, 429-442, 499-505, 641-649, 678-692, 735-736, 757-761, 776-777, 2997-3103, 3113-3121, 3305-3455, 3479-3493, 3522-3540, 3549-3556, 3628-3698, 3755-3810, 3874, 3890-3901, 3905-3911, 3913-3929, 3972-3989.
393. A method of installing a peptide tag or epitope onto a protein using prime editing, comprising: contacting a target nucleotide sequence encoding the protein with a prime editor construct configured to insert therein a second nucleotide sequence encoding the peptide tag to result in a recombinant nucleotide sequence, such that the peptide tag and the protein are expressed from the recombinant nucleotide sequence as a fusion protein.
394. The method of embodiment 383, wherein the peptide tag is used for purification and/or detection of the protein.
395. The method of embodiment 383, wherein the peptide tag is a poly-histidine (e.g., HHHHHH (SEQ ID NO: 252-262)), FLAG (e.g., DYKDDDDK (SEQ ID NO: 2)), V5 (e.g., GKPIPNPLLGLDST (SEQ ID NO: 3)), GCN4, HA (e.g., YPYDVPDYA (SEQ ID NO: 5)), Myc (e.g. EQKLISEED (SEQ ID NO: 6)), or GST.
396. The method of embodiment 383, wherein the peptide tag has an amino acid sequence selected from the group consisting of SEQ ID NO: 245-290.
397. The method of embodiment 383, wherein the peptide tag is fused to the protein by a linker.
398. The method of embodiment 383, wherein the fusion protein has the following structure: [protein]-[peptide tag] or [peptide tag]-[protein], wherein “]-[” represents an optional linker.
399. The method of embodiment 383, wherein the linker has an amino acid sequence of SEQ ID NOs: 127, 165-176, 446, 453, and 767-769.
400. The method of embodiment 383, wherein the prime editor construct comprises a PEgRNA comprising the nucleotide sequence of SEQ ID NOs: 18-101-104, 181-183, 223-234, 237-244, 277, 324-330, 332, 334, 336, 338, 340, 342, 344, 346, 348, 350, 352, 354, 356, 358, 360, 362, 364, 366, 368, 394, 429-442, 499-505, 641-649, 678-692, 735-736, 757-761, 776-777, 2997-3103, 3113-3121, 3305-3455, 3479-3493, 3522-3540, 3549-3556, 3628-3698, 3755-3810, 3874, 3890-3901, 3905-3911, 3913-3929, 3972-3989.
401. The method of embodiment 383, wherein the PEgRNA comprises a spacer, a gRNA core, and an extension arm, wherein the spacer is complementary to the target nucleotide sequence and the extension arm comprises a reverse transcriptase template that encodes the peptide tag.
402. The method of embodiment 383, wherein the PEgRNA comprises a spacer, a gRNA core, and an extension arm, wherein the spacer is complementary to the target nucleotide sequence and the extension arm comprises a reverse transcriptase template that encodes the peptide tag.
403. A method of preventing or halting the progression of a prion disease by installing on or more protective mutations into PRNP encoded by a target nucleotide sequence by prime editing, the method comprising: (a) contacting the target nucleotide sequence with a (i) prime editor comprising a nucleic acid programmable DNA binding protein (napDNAbp) and a polymerase and (ii) a PEgRNA comprising an edit template encoding the functional moiety; (b) polymerizing a single strand DNA sequence encoding the protective mutation; and (c) incorporating the single strand DNA sequence in place of a corresponding endogenous strand at the target nucleotide sequence through a DNA repair and/or replication process, wherein the method produces a recombinant target nucleotide sequence that encodes a PRNP comprising a protective mutation and which is resistant to misfolding.
404. The method of embodiment 403, wherein the prion disease is a human prion disease.
405. The method of embodiment 403, wherein the prion disease is an animal prion disease.
406. The method of embodiment 404, wherein the prion disease is Creutzfeldt-Jakob Disease (CJD), Variant Creutzfeldt-Jakob Disease (vCJD), Gerstmann-Straussler-Scheinker Syndrome, Fatal Familial Insomnia, or Kuru.
407. The method of embodiment 403, wherein the prion disease is Bovine Spongiform Encephalopathy (BSE or “mad cow disease”), Chronic Wasting Disease (CWD), Scrapie, Transmissible Mink Encephalopathy, Feline Spongiform Encephalopathy, and Ungulate Spongiform Encephalopathy.
408. The method of embodiment 403, wherein the wildtype PRNP amino acid sequence is SEQ ID NOs: 291-292.
409. The method of embodiment 403, wherein the method results in a modified PRNP amino acid sequence selected from the group consisting of SEQ ID NOs: 293-323, wherein said modified PRNP protein is resistant to misfolding.
410. The method of embodiment 403, wherein the fusion protein comprises the amino acid sequence of PE1, PE2, or PE3.
411. The method of embodiment 403, wherein the napDNAbp is a Cas9 nickase (nCas9).
412. The method of embodiment 403, wherein the napDNAbp comprises the amino acid sequence of SEQ ID NOs:18-88, 126, 130, 137, 141, 147, 153, 157, 445, 460, 467, and 482-487.
413. The method of embodiment 403, wherein the PEgRNA comprises SEQ ID NOs: 101-104, 181-183, 223-234, 237-244, 277, 324-330, 332, 334, 336, 338, 340, 342, 344, 346, 348, 350, 352, 354, 356, 358, 360, 362, 364, 366, 368, 394, 429-442, 499-505, 641-649, 678-692, 735-736, 757-761, 776-777, 2997-3103, 3113-3121, 3305-3455, 3479-3493, 3522-3540, 3549-3556, 3628-3698, 3755-3810, 3874, 3890-3901, 3905-3911, 3913-3929, 3972-3989.
414. A method of installing a ribonucleotide motif or tag in an RNA of interest encoded by a target nucleotide sequence by prime editing, the method comprising: (a) contacting the target nucleotide sequence with a (i) prime editor comprising a nucleic acid programmable DNA binding protein (napDNAbp) and a polymerase and (ii) a PEgRNA comprising an edit template encoding the ribonucleotide motif or tag; (b) polymerizing a single strand DNA sequence encoding the ribonucleotide motif or tag; and (c) incorporating the single strand DNA sequence in place of a corresponding endogenous strand at the target nucleotide sequence through a DNA repair and/or replication process, wherein the method produces a recombinant target nucleotide sequence that encodes a modified RNA of interest comprising the ribonucleotide motif or tag.
415. The method of embodiment 414, wherein ribonucleotide motif or tag is a detection moiety.
416. The method of embodiment 414, wherein the ribonucleotide motif or tag affects the expression level of the RNA of interest.
417. The method of embodiment 414, wherein the ribonucleotide motif or tag affects the transport or subcellular location of the RNA of interest.
418. The method of embodiment 414, wherein the ribonucleotide motif or tag is selected from the group consisting of SV40 type 1, SV40 type 2, SV40 type 3, hGH, BGH, rbGlob, TK, MALAT1 ENE-mascRNA, KSHV PAN ENE, Smbox/U1 snRNA box, U1 snRNA 3′ box, tRNA-lysine, broccoli aptamer, spinach aptamer, mango aptamer, HDV ribozyme, and m6A.
419. The method of embodiment 414, wherein the PEgRNA comprises SEQ ID NOs: 18-88, 126, 130, 137, 141, 147, 153, 157, 445, 460, 467, and 482-487.
420. The method of embodiment 414, wherein the fusion protein comprises the amino acid sequence of PE1, PE2, or PE3.
421. The method of embodiment 414, wherein the napDNAbp is a Cas9 nickase (nCas9).
422. The method of embodiment 414, wherein the napDNAbp comprises the amino acid sequence of SEQ ID NOs: 18-88, 126, 130, 137, 141, 147, 153, 157, 445, 460, 467, and 482-487.
423. A method of installing or deleting a functional moiety in a protein of interest encoded by a target nucleotide sequence by prime editing, the method comprising: (a) contacting the target nucleotide sequence with a (i) prime editor comprising a nucleic acid programmable DNA binding protein (napDNAbp) and a polymerase and (ii) a PEgRNA comprising an edit template encoding the functional moiety or deletion of same; (b) polymerizing a single strand DNA sequence encoding the functional moiety or deletion of same; and (c) incorporating the single strand DNA sequence in place of a corresponding endogenous strand at the target nucleotide sequence through a DNA repair and/or replication process, wherein the method produces a recombinant target nucleotide sequence that encodes a modified protein comprising the protein of interest and the functional moiety or the removal of same, wherein the functional moiety alters a modification state or localization state of the protein.
424. The method of embodiment 423, wherein functional moiety alters the phosphorylation, ubiquitylation, glycosylation, lipidation, hydroxylation, methylation, acetylation, crotonylation, SUMOylation state of the protein of interest.

### Group A. Fusion Proteins, Guides, and Methods

[2035] Embodiment 1. A fusion protein comprising a nucleic acid programmable DNA binding protein (napDNAbp) and a reverse transcriptase.

[2036] Embodiment 2. The fusion protein of embodiment 1, wherein the fusion protein is capable of carrying out genome editing by target-primed reverse transcription in the presence of an extended guide RNA.

[2037] Embodiment 3. The fusion protein of embodiment 1, wherein the napDNAbp has a nickase activity.

[2038] Embodiment 4. The fusion protein of embodiment 1, wherein the napDNAbp is a Cas9 protein or variant thereof.

[2039] Embodiment 5. The fusion protein of embodiment 1, wherein the napDNAbp is a nuclease active Cas9, a nuclease inactive Cas9 (dCas9), or a Cas9 nickase (nCas9).

[2040] Embodiment 6. The fusion protein of embodiment 1, wherein the napDNAbp is Cas9 nickase (nCas9).

[2041] Embodiment 7. The fusion protein of embodiment 1, wherein the napDNAbp is selected from the group consisting of: Cas9, CasX, CasY, Cpf1, C2c1, C2c2, C2C3, and Argonaute and optionally has a nickase activity.

[2042] Embodiment 8. The fusion protein of embodiment 1, wherein the fusion protein when complexed with an extended guide RNA is capable of binding to a target DNA sequence.

[2043] Embodiment 9. The fusion protein of embodiment 8, wherein the target DNA sequence comprises a target strand and a complementary non-target strand.

[2044] Embodiment 10. The fusion protein of embodiment 8, wherein the binding of the fusion protein complexed to the extended guide RNA forms an R-loop.

[2045] Embodiment 11. The fusion protein of embodiment 10, wherein the R-loop comprises (i) an RNA-DNA hybrid comprising the extended guide RNA and the target strand, and (ii) the complementary non-target strand.

[2046] Embodiment 12. The fusion protein of embodiment 11, wherein the complementary non-target strand is nicked to form a reverse transcriptase priming sequence having a free 3′ end.

[2047] Embodiment 13. The fusion protein of embodiment 2, wherein the extended guide RNA comprises (a) a guide RNA, and (b) an RNA extension at the 5′ or the 3′ end of the guide RNA, or at an intramolecular location in the guide RNA.

[2048] Embodiment 14. The fusion protein of embodiment 13, wherein the RNA extension comprises (i) a reverse transcription template sequence comprising a desired nucleotide change, (ii) a reverse transcription primer binding site, and (iii) optionally, a linker sequence.

[2049] Embodiment 15. The fusion protein of embodiment 14, wherein the reverse transcription template sequence encodes a single-strand DNA flap that is complementary to an endogenous DNA sequence adjacent to the nick site, wherein the single-strand DNA flap comprises the desired nucleotide change.

[2050] Embodiment 16. The fusion protein of embodiment 13, wherein the RNA extension is at least 5 nucleotides, at least 6 nucleotides, at least 7 nucleotides, at least 8 nucleotides, at least 9 nucleotides, at least 10 nucleotides, at least 11 nucleotides, at least 12 nucleotides, at least 13 nucleotides, at least 14 nucleotides, at least 15 nucleotides, at least 16 nucleotides, at least 17 nucleotides, at least 18 nucleotides, at least 19 nucleotides, at least 20 nucleotides, at least 21 nucleotides, at least 22 nucleotides, at least 23 nucleotides, at least 24 nucleotides, or at least 25 nucleotides in length.

[2051] Embodiment 17. The fusion protein of embodiment 15, wherein the single-strand DNA flap hybridizes to the endogenous DNA sequence adjacent to the nick site, thereby installing the desired nucleotide change.

[2052] Embodiment 18. The fusion protein of embodiment 15, wherein the single-stranded DNA flap displaces the endogenous DNA sequence adjacent to the nick site and which has a free 5′ end.

[2053] Embodiment 19. The fusion protein of embodiment 18, wherein the endogenous DNA sequence having the 5′ end is excised by the cell.

[2054] Embodiment 20. The fusion protein of embodiment 18, wherein cellular repair of the single-strand DNA flap results in installation of the desired nucleotide change, thereby forming a desired product.

[2055] Embodiment 21. The fusion protein of embodiment 14, wherein the desired nucleotide change is installed in an editing window that is between about −4 to +10 of the PAM sequence, or between about −10 to +20 of the PAM sequence, or between about −20 to +40 of the PAM sequence, or between about −30 to +100 of the PAM sequence, or wherein the desired nucleotide change is installed at least 1, 2, 3, 4, 5, 6, 7, 8, 9, 10, 11, 12, 13, 14, 15, 16, 17, 18, 19, 20, 21, 22, 23, 24, 25, 26, 27, 28, 29, 30, 31, 32, 33, 34, 35, 36, 37, 38, 39, 40, 41, 42, 43, 44, 45, 46, 47, 48, 49, 50, 51, 52, 53, 54, 55, 56, 57, 58, 59, 60, 61, 62, 63, 64, 65, 66, 67, 68, 69, 70, 71, 72, 73, 74, 75, 76, 77, 78, 79, 80, 81, 82, 83, 84, 85, 86, 87, 88, 89, 90, 91, 92, 93, 94, 95, 96, 97, 98, 99, or 100 nucleotides downstream of the nick site.

[2056] Embodiment 22. The fusion protein of embodiment 1, wherein the napDNAbp comprises an amino acid sequence of SEQ ID NO: 18, or an amino acid sequence that is at least 80%, 85%, 90%, 95%, 98%, or 99% identical to the amino acid sequence to SEQ ID NO: 18.

[2057] Embodiment 23. The fusion protein of embodiment 1, wherein the napDNAbp comprises an amino acid sequence that is at least 80%, 85%, 90%, 95%, 98%, or 99% identical to the amino acid sequence of any one of SEQ ID NOs: 18-88, 126, 130, 137, 141, 147, 153, 157, 445, 460, 467, and 482-487.

[2058] The fusion protein of embodiment 1, wherein the reverse transcriptase comprises any one of the amino acid sequences of SEQ ID NO: 89.

[2059] Embodiment 24. The fusion protein of embodiment 1, wherein the reverse transcriptase comprises any one of the amino acid sequences of SEQ ID NOs: 89-100, 105-122, 128-129, 132, 139, 143, 149, 154, 159, 235, 454, 471, 516, 662, 700, 701-716, 739-741, and 766.

[2060] The fusion protein of embodiment 1, wherein the reverse transcriptase comprises an amino acid sequence that is at least 80%, 85%, 90%, 95%, 98%, or 99% identical to the amino acid sequence of any one of SEQ ID NO: 89.

[2061] Embodiment 25. The fusion protein of embodiment 1, wherein the reverse transcriptase comprises an amino acid sequence that is at least 80%, 85%, 90%, 95%, 98%, or 99% identical to the amino acid sequence of any one of SEQ ID NOs: 89-100, 105-122, 128-129, 132, 139, 143, 149, 154, 159, 235, 454, 471, 516, 662, 700, 701-716, 739-741, and 766.

[2062] Embodiment 26. The fusion protein of embodiment 1, wherein the reverse transcriptase is a naturally-occurring reverse transcriptase from a retrovirus or a retrotransposon.

[2063] Embodiment 27. The fusion protein of any one of the previous embodiments, wherein the fusion protein comprises the structure NH2-[napDNAbp]-[reverse transcriptase]-COOH; or NH2-[reverse transcriptase]-[napDNAbp]-COOH, wherein each instance of “]-[” indicates the presence of an optional linker sequence.

[2064] Embodiment 28. The fusion protein of embodiment 27, wherein the linker sequence comprises an amino acid sequence of SEQ ID NOs: 127, 165-176, 446, 453, and 767-769.

[2065] Embodiment 29. The fusion protein of embodiment 14, wherein the desired nucleotide change is a single nucleotide change, an insertion of one or more nucleotides, or a deletion of one or more nucleotides.

[2066] Embodiment 30. The fusion protein of embodiment 29, wherein the insert or deletion is at least 1, at least 2, at least 3, at least 4, at least 5, at least 6, at least 7, at least 8, at least 9, at least 10, at least 11, at least 12, at least 13, at least 14, at least 15, at least 16, at least 17, at least 18, at least 19, at least 20, at least 21, at least 22, at least 23, at least 24, at least 25, at least 26, at least 27, at least 28, at least 29, at least 30, at least 31, at least 32, at least 33, at least 34, at least 35, at least 36, at least 37, at least 38, at least 39, at least 40, at least 41, at least 42, at least 43, at least 44, at least 45, at least 46, at least 47, at least 48, at least 49, or at least 50.

[2067] Embodiment 31. An extended guide RNA comprising a guide RNA and at least one RNA extension.

[2068] Embodiment 32. The extended guide RNA of embodiment 1, wherein the RNA extension is position at the 3′ or 5′ end of the guide RNA, or at an intramolecular position in the guide RNA.

[2069] Embodiment 33. The extended guide RNA of embodiment 31, wherein the extended guide RNA is capable of binding to a napDNAbp and directing the napDNAbp to a target DNA sequence.

[2070] Embodiment 34. The extended guide RNA of embodiment 33, wherein the target DNA sequence comprises a target strand and a complementary non-target strand, wherein the guide RNA hybridizes to the target strand to form an RNA-DNA hybrid and an R-loop.

[2071] Embodiment 35. The extended guide RNA of embodiment 31, wherein the at least one RNA extension comprises (i) a reverse transcription template sequence, (ii) a reverse transcription primer binding site, and (iii) optionally a linker sequence.

[2072] Embodiment 36. The extended guide RNA of embodiment 35, wherein the RNA extension is at least 5 nucleotides, at least 6 nucleotides, at least 7 nucleotides, at least 8 nucleotides, at least 9 nucleotides, at least 10 nucleotides, at least 11 nucleotides, at least 12 nucleotides, at least 13 nucleotides, at least 14 nucleotides, at least 15 nucleotides, at least 16 nucleotides, at least 17 nucleotides, at least 18 nucleotides, at least 19 nucleotides, at least 20 nucleotides, at least 21 nucleotides, at least 22 nucleotides, at least 23 nucleotides, at least 24 nucleotides, or at least 25 nucleotides in length.

[2073] Embodiment 37. The extended guide RNA of embodiment 35, wherein the reverse transcription template sequence is at least 3 nucleotides, at least 4 nucleotides, at least 5 nucleotides, at least 6 nucleotides, at least 7 nucleotides, at least 8 nucleotides, at least 9 nucleotides, at least 10 nucleotides, at least 11 nucleotides, at least 12 nucleotides, at least 13 nucleotides, at least 14 nucleotides, or at least 15 nucleotides in length.

[2074] Embodiment 38. The extended guide RNA of embodiment 35, wherein the reverse transcription primer binding site sequence is at least 3 nucleotides, at least 4 nucleotides, at least 5 nucleotides, at least 6 nucleotides, at least 7 nucleotides, at least 8 nucleotides, at least 9 nucleotides, at least 10 nucleotides, at least 11 nucleotides, at least 12 nucleotides, at least 13 nucleotides, at least 14 nucleotides, or at least 15 nucleotides in length.

[2075] Embodiment 39. The extended guide RNA of embodiment 35, wherein the optional linker sequence is at least 3 nucleotides, at least 4 nucleotides, at least 5 nucleotides, at least 6 nucleotides, at least 7 nucleotides, at least 8 nucleotides, at least 9 nucleotides, at least 10 nucleotides, at least 11 nucleotides, at least 12 nucleotides, at least 13 nucleotides, at least 14 nucleotides, or at least 15 nucleotides in length.

[2076] Embodiment 40. The extended guide RNA of embodiment 35, wherein the reverse transcription template sequence encodes a single-strand DNA flap that is complementary to an endogenous DNA sequence adjacent to a nick site, wherein the single-strand DNA flap comprises a desired nucleotide change.

[2077] Embodiment 41. The extended guide RNA of embodiment 40, wherein the single-stranded DNA flap displaces an endogenous single-strand DNA having a 5′ end in the target DNA sequence that has been nicked, and wherein the endogenous single-strand DNA is immediately adjacent downstream of the nick site.

[2078] Embodiment 42. The extended guide RNA of embodiment 41, wherein the endogenous single-stranded DNA having the free 5′ end is excised by the cell.

[2079] Embodiment 43. The extended guide RNA of embodiment 41, wherein cellular repair of the single-strand DNA flap results in installation of the desired nucleotide change, thereby forming a desired product.

[2080] Embodiment 44. The extended guide RNA of embodiment 31, comprising the nucleotide sequence of SEQ ID NOs: 394, 429-442, 641-649, 678-692, 2997-3103, 3113-3121, 3305-3455, 3479-3493, 3522-3556, 3628-3698, and 3755-3810, or a nucleotide sequence having at least 85%, or at least 90%, or at least 95%, or at least 98%, or at least 99% sequence identity with any one of SEQ ID NOs: 394, 429-442, 641-649, 678-692, 2997-3103, 3113-3121, 3305-3455, 3479-3493, 3522-3556, 3628-3698, and 3755-3810.

[2081] Embodiment 45. The extended guide RNA of embodiment 35, wherein the reverse transcription template sequence comprises a nucleotide sequence that is at least 80%, or 85%, or 90%, or 95%, or 99% identical to the endogenous DNA target.

[2082] Embodiment 46. The extended guide RNA of embodiment 35, wherein the reverse transcription primer binding site hybridizes with a free 3′ end of the cut DNA.

[2083] Embodiment 47. The extended guide RNA of embodiment 35, wherein the optional linker sequence is at least 1 nucleotide, or at least 2, at least 3, at least 4, at least 5, at least 6, at least 7, at least 8, at least 9, at least 10, at least 11, at least 12, at least 13, at least 14, or at least 15 nucleotides in length.

[2084] Embodiment 48. A complex comprising a fusion protein of any one of embodiments 1-30 and an extended guide RNA.

[2085] Embodiment 49. The complex of embodiment 48, wherein the extended guide RNA comprises a guide RNA and an RNA extension at the 3′ or 5′ end of the guide RNA or at an intramolecular position in the guide RNA.

[2086] Embodiment 50. The complex of embodiment 48, wherein the extended guide RNA is capable of binding to a napDNAbp and directing the napDNAbp to a target DNA sequence.

[2087] Embodiment 51. The complex of embodiment 50, wherein the target DNA sequence comprises a target strand and a complementary non-target strand, wherein the guide RNA hybridizes to the target strand to form an RNA-DNA hybrid and an R-loop.

[2088] Embodiment 52. The complex of embodiment 49, wherein the at least one RNA extension comprises (i) a reverse transcription template sequence, (ii) a reverse transcription primer binding site, and (iii) optionally a linker sequence.

[2089] Embodiment 53. The complex of embodiment 48, wherein the extended guide RNA comprises the nucleotide sequence of SEQ ID NOs: 394, 429-442, 641-649, 678-692, 2997-3103, 3113-3121, 3305-3455, 3479-3493, 3522-3556, 3628-3698, and 3755-3810, or a nucleotide sequence having at least 85%, or at least 90%, or at least 95%, or at least 98%, or at least 99% sequence identity with any one of SEQ ID NOs: 394, 429-442, 641-649, 678-692, 2997-3103, 3113-3121, 3305-3455, 3479-3493, 3522-3556, 3628-3698, and 3755-3810.

[2090] Embodiment 54. The complex of embodiment 52, wherein the reverse transcription template sequence comprises a nucleotide sequence having at least 80%, or 85%, or 90%, or 95%, or 99% sequence identity with the endogenous DNA target.

[2091] Embodiment 55. The complex of embodiment 52, wherein the reverse transcription primer binding site hybridizes with a free 3′ end of the cut DNA.

[2092] Embodiment 56. A complex comprising a napDNAbp and an extended guide RNA.

[2093] Embodiment 57. The complex of embodiment 56, wherein the napDNAbp is a Cas9 nickase.

[2094] Embodiment 58. The complex of embodiment 56, wherein the napDNAbp comprises an amino acid sequence of SEQ ID NO: 18, or an amino acid sequence having at least 80%, 85%, 90%, 95%, 98%, or 99% sequence identity with SEQ ID NO: 18.

[2095] Embodiment 59. The complex of embodiment 57, wherein the napDNAbp comprises an amino acid sequence having at least 80%, 85%, 90%, 95%, 98%, or 99% sequence identity with the amino acid sequence of any one of SEQ ID NOs: 18-88, 126, 130, 137, 141, 147, 153, 157, 445, 460, 467, and 482-487.

[2096] Embodiment 60. The complex of embodiment 57, wherein the extended guide RNA comprises a guide RNA and an RNA extension at the 3′ or 5′ end of the guide RNA, or at an intramolecular position in the guide RNA.

[2097] Embodiment 61. The complex of embodiment 57, wherein the extended guide RNA is capable of directing the napDNAbp to a target DNA sequence.

[2098] Embodiment 62. The complex of embodiment 61, wherein the target DNA sequence comprises a target strand and a complementary non-target strand, wherein the spacer sequence hybridizes to the target strand to form an RNA-DNA hybrid and an R-loop.

[2099] Embodiment 63. The complex of embodiment 61, wherein the RNA extension comprises (i) a reverse transcription template sequence, (ii) a reverse transcription primer binding site, and (iii) optionally a linker sequence.

[2100] Embodiment 64. The complex of embodiment 57, wherein the extended guide RNA comprises the nucleotide sequence of SEQ ID NOs: 394, 429-442, 641-649, 678-692, 2997-3103, 3113-3121, 3305-3455, 3479-3493, 3522-3556, 3628-3698, and 3755-3810, or a nucleotide sequence having at least 85%, or at least 90%, or at least 95%, or at least 98%, or at least 99% sequence identity with any one of SEQ ID NOs: 394, 429-442, 641-649, 678-692, 2997-3103, 3113-3121, 3305-3455, 3479-3493, 3522-3556, 3628-3698, and 3755-3810.

[2101] Embodiment 65. The complex of embodiment 63, wherein the reverse transcription template sequence comprises a nucleotide sequence that is at least 80%, or 85%, or 90%, or 95%, or 99% identical to the endogenous DNA target.

[2102] Embodiment 66. The complex of embodiment 63, wherein the reverse transcription primer binding site hybridizes with a free 3′ end of the cut DNA.

[2103] Embodiment 67. The complex of embodiment 63, wherein the optional linker sequence is at least 1 nucleotide, or at least 2, at least 3, at least 4, at least 5, at least 6, at least 7, at least 8, at least 9, at least 10, at least 11, at least 12, at least 13, at least 14, or at least 15 nucleotides in length.

[2104] Embodiment 68. A polynucleotide encoding the fusion protein of any of embodiments 1-30.

[2105] Embodiment 69. A vector comprising the polynucleotide of embodiment 68.

[2106] Embodiment 70. A cell comprising the fusion protein of any of embodiments 1-30 and an extended guide RNA bound to the napDNAbp of the fusion protein.

[2107] Embodiment 71. A cell comprising a complex of any one of embodiments 48-67.

[2108] Embodiment 72. A pharmaceutical composition comprising: (i) a fusion protein of any of embodiments 1-30, the complex of embodiments 48-67, the polynucleotide of embodiment 68, or the vector of embodiment 69; and (ii) a pharmaceutically acceptable excipient.

[2109] Embodiment 73. A pharmaceutical composition comprising: (i) the complex of embodiments 48-67 (ii) reverse transcriptase provided in trans; and (iii) a pharmaceutically acceptable excipient.

[2110] Embodiment 74. A kit comprising a nucleic acid construct, comprising: (i) a nucleic acid sequencing encoding the fusion protein of any one of embodiments 1-30; and (ii) a promoter that drives expression of the sequence of (i).

[2111] Embodiment 75. A method for installing a desired nucleotide change in a double-stranded DNA sequence, the method comprising:

[2112] (i) contacting the double-stranded DNA sequence with a complex comprising a fusion protein and an extended guide RNA, wherein the fusion protein comprises a napDNAbp and a reverse transcriptase and wherein the extended guide RNA comprises a reverse transcription template sequence comprising the desired nucleotide change;

[2113] (ii) nicking the double-stranded DNA sequence on the non-target strand, thereby generating a free single-strand DNA having a 3′ end;

[2114] (iii) hybridizing the 3′ end of the free single-strand DNA to the reverse transcription template sequence, thereby priming the reverse transcriptase domain;

[2115] (iv) polymerizing a strand of DNA from the 3′ end, thereby generating a single-strand DNA flap comprising the desired nucleotide change;

[2116] (v) replacing an endogenous DNA strand adjacent the cut site with the single-strand DNA flap, thereby installing the desired nucleotide change in the double-stranded DNA sequence.

[2117] Embodiment 76. The method of embodiment 75, wherein the step of (v) replacing comprises: (i) hybridizing the single-strand DNA flap to the endogenous DNA strand adjacent the cut site to create a sequence mismatch; (ii) excising the endogenous DNA strand; and (iii) repairing the mismatch to form the desired product comprising the desired nucleotide change in both strands of DNA.

[2118] Embodiment 77. The method of embodiment 76, wherein the desired nucleotide change is a single nucleotide substitution, a deletion, or an insertion.

[2119] Embodiment 78. The method of embodiment 77, wherein the single nucleotide substitution is a transition or a transversion.

[2120] Embodiment 79. The method of embodiment 76, wherein the desired nucleotide change is (1) a G to T substitution, (2) a G to A substitution, (3) a G to C substitution, (4) a T to G substitution, (5) a T to A substitution, (6) a T to C substitution, (7) a C to G substitution, (8) a C to T substitution, (9) a C to A substitution, (10) an A to T substitution, (11) an A to G substitution, or (12) an A to C substitution.

[2121] Embodiment 80. The method of embodiment 76, wherein the desired nucleoid change converts (1) a G:C basepair to a T:A basepair, (2) a G:C basepair to an A:T basepair, (3) a G:C basepair to C:G basepair, (4) a T:A basepair to a G:C basepair, (5) a T:A basepair to an A:T basepair, (6) a T:A basepair to a C:G basepair, (7) a C:G basepair to a G:C basepair, (8) a C:G basepair to a T:A basepair, (9) a C:G basepair to an A:T basepair, (10) an A:T basepair to a T:A basepair, (11) an A:T basepair to a G:C basepair, or (12) an A:T basepair to a C:G basepair.

[2122] Embodiment 81. The method of embodiment 76, wherein the desired nucleotide change is an insertion or deletion of 1, 2, 3, 4, 5, 6, 7, 8, 9, 10, 11, 12, 13, 14, 15, 16, 17, 18, 19, 20, 21, 22, 23, 24, or 25 nucleotides.

[2123] Embodiment 82. The method of embodiment 76, wherein the desired nucleotide change corrects a disease-associated gene.

[2124] Embodiment 83. The method of embodiment 82, wherein the disease-associated gene is associated with a monogentic disorder selected from the group consisting of: Adenosine Deaminase (ADA) Deficiency; Alpha-1 Antitrypsin Deficiency; Cystic Fibrosis; Duchenne Muscular Dystrophy; Galactosemia; Hemochromatosis; Huntington's Disease; Maple Syrup Urine Disease; Marfan Syndrome; Neurofibromatosis Type 1; Pachyonychia Congenita; Phenylkeotnuria; Severe Combined Immunodeficiency; Sickle Cell Disease; Smith-Lemli-Opitz Syndrome; and Tay-Sachs Disease.

[2125] Embodiment 84. The method of embodiment 82, wherein the disease-associated gene is associated with a polygenic disorder selected from the group consisting of: heart disease; high blood pressure; Alzheimer's disease; arthritis; diabetes; cancer; and obesity.

[2126] Embodiment 85. The method of embodiment 76, wherein the napDNAbp is a nuclease dead Cas9 (dCas9), a Cas9 nickase (nCas9), or a nuclease active Cas9.

[2127] Embodiment 86. The method of embodiment 76, wherein the napDNAbp comprises an amino acid sequence of SEQ ID NO: 18.

[2128] Embodiment 87. The method of embodiment 76, wherein the napDNAbp comprises an amino acid sequence having at least 80%, 85%, 90%, 95%, 98%, or 99% sequence identity with the amino acid sequence of any one of SEQ ID NOs: 18-88, 126, 130, 137, 141, 147, 153, 157, 445, 460, 467, and 482-487.

[2129] Embodiment 88. The method of embodiment 76, wherein the reverse transcriptase comprises any one of the amino acid sequences of SEQ ID NOs: 89-100, 105-122, 128-129, 132, 139, 143, 149, 154, 159, 235, 454, 471, 516, 662, 700, 701-716, 739-741, and 766.

[2130] Embodiment 89. The method of embodiment 76, wherein the reverse transcriptase domain comprises an amino acid sequence having at least 80%, 85%, 90%, 95%, 98%, or 99% sequence identity with the amino acid sequence of any one of SEQ ID NOs: 89-100, 105-122, 128-129, 132, 139, 143, 149, 154, 159, 235, 454, 471, 516, 662, 700, 701-716, 739-741, and 766.

[2131] Embodiment 90. The method of embodiment 76, wherein the extended guide RNA comprises an RNA extension at the 3′ or 5′ ends or at an intramolecular location in the guide RNA, wherein the RNA extension comprises the reverse transcription template sequence.

[2132] Embodiment 91. The method of embodiment 90, wherein the RNA extension is at least 5 nucleotides, at least 6 nucleotides, at least 7 nucleotides, at least 8 nucleotides, at least 9 nucleotides, at least 10 nucleotides, at least 11 nucleotides, at least 12 nucleotides, at least 13 nucleotides, at least 14 nucleotides, at least 15 nucleotides, at least 16 nucleotides, at least 17 nucleotides, at least 18 nucleotides, at least 19 nucleotides, at least 20 nucleotides, at least 21 nucleotides, at least 22 nucleotides, at least 23 nucleotides, at least 24 nucleotides, or at least 25 nucleotides in length.

[2133] Embodiment 92. The method of embodiment 76, wherein the extended guide RNA has a nucleotide sequence selected from the group consisting of SEQ ID NOs: 394, 429-442, 641-649, 678-692, 2997-3103, 3113-3121, 3305-3455, 3479-3493, 3522-3556, 3628-3698, and 3755-3810.

[2134] Embodiment 93. A method for introducing one or more changes in the nucleotide sequence of a DNA molecule at a target locus, comprising:

[2135] (i) contacting the DNA molecule with a nucleic acid programmable DNA binding protein (napDNAbp) and a guide RNA which targets the napDNAbp to the target locus, wherein the guide RNA comprises a reverse transcriptase (RT) template sequence comprising at least one desired nucleotide change;

[2136] (ii) forming an exposed 3′ end in a DNA strand at the target locus;

[2137] (iii) hybridizing the exposed 3′ end to the RT template sequence to prime reverse transcription;

[2138] (iv) synthesizing a single strand DNA flap comprising the at least one desired nucleotide change based on the RT template sequence by reverse transcriptase;

[2139] (v) and incorporating the at least one desired nucleotide change into the corresponding endogenous DNA, thereby introducing one or more changes in the nucleotide sequence of the DNA molecule at the target locus.

[2140] Embodiment 94. The method of embodiment 93, wherein the one or more changes in the nucleotide sequence comprises a transition.

[2141] Embodiment 95. The method of embodiment 94, wherein the transition is selected from the group consisting of: (a) T to C; (b) A to G; (c) C to T; and (d) G to A.

[2142] Embodiment 96. The method of embodiment 93, wherein the one or more changes in the nucleotide sequence comprises a transversion.

[2143] Embodiment 97. The method of embodiment 96, wherein the transversion is selected from the group consisting of: (a) T to A; (b) T to G; (c) C to G; (d) C to A; (e) A to T; (f) A to C; (g) G to C; and (h) G to T.

[2144] Embodiment 98. The method of embodiment 93, wherein the one or more changes in the nucleotide sequence comprises changing (1) a G:C basepair to a T:A basepair, (2) a G:C basepair to an A:T basepair, (3) a G:C basepair to C:G basepair, (4) a T:A basepair to a G:C basepair, (5) a T:A basepair to an A:T basepair, (6) a T:A basepair to a C:G basepair, (7) a C:G basepair to a G:C basepair, (8) a C:G basepair to a T:A basepair, (9) a C:G basepair to an A:T basepair, (10) an A:T basepair to a T:A basepair, (11) an A:T basepair to a G:C basepair, or (12) an A:T basepair to a C:G basepair.

[2145] Embodiment 99. The method of embodiment 93, wherein the one or more changes in the nucleotide sequence comprises an insertion or deletion of 1, 2, 3, 4, 5, 6, 7, 8, 9, 10, 11, 12, 13, 14, 15, 16, 17, 18, 19, 20, 21, 22, 23, 24, or 25 nucleotides.

[2146] Embodiment 100. The method of embodiment 93, wherein the one or more changes in the nucleotide sequence comprises a correction to a disease-associated gene.

[2147] Embodiment 101. The method of embodiment 100, wherein the disease-associated gene is associated with a monogentic disorder selected from the group consisting of: Adenosine Deaminase (ADA) Deficiency; Alpha-1 Antitrypsin Deficiency; Cystic Fibrosis; Duchenne Muscular Dystrophy; Galactosemia; Hemochromatosis; Huntington's Disease; Maple Syrup Urine Disease; Marfan Syndrome; Neurofibromatosis Type 1; Pachyonychia Congenita; Phenylkeotnuria; Severe Combined Immunodeficiency; Sickle Cell Disease; Smith-Lemli-Opitz Syndrome; and Tay-Sachs Disease.

[2148] Embodiment 102. The method of embodiment 100, wherein the disease-associated gene is associated with a polygenic disorder selected from the group consisting of: heart disease; high blood pressure; Alzheimer's disease; arthritis; diabetes; cancer; and obesity.

[2149] Embodiment 103. The method of embodiment 93, wherein the napDNAbp is a nuclease active Cas9 or variant thereof.

[2150] Embodiment 104. The method of embodiment 93, wherein the napDNAbp is a nuclease inactive Cas9 (dCas9) or Cas9 nickase (nCas9), or a variant thereof.

[2151] Embodiment 105. The method of embodiment 93, wherein the napDNAbp comprises an amino acid sequence of SEQ ID NO: 18.

[2152] Embodiment 106. The method of embodiment 93, wherein the napDNAbp comprises an amino acid sequence having at least 80%, 85%, 90%, 95%, 98%, or 99% sequence identity with the amino acid sequence of any one of SEQ ID NOs: 18-88, 126, 130, 137, 141, 147, 153, 157, 445, 460, 467, and 482-487.

[2153] Embodiment 107. The method of embodiment 93, wherein the reverse transcriptase is introduced in trans.

[2154] Embodiment 108. The method of embodiment 93, wherein the napDNAbp comprises a fusion to a reverse transcriptase.

[2155] Embodiment 109. The method of embodiment 93, wherein the reverse transcriptase comprises any one of the amino acid sequences of SEQ ID NOs: 89-100, 105-122, 128-129, 132, 139, 143, 149, 154, 159, 235, 454, 471, 516, 662, 700, 701-716, 739-741, and 766.

[2156] Embodiment 110. The method of embodiment 93, wherein the reverse transcriptase comprises an amino acid sequence having at least 80%, 85%, 90%, 95%, 98%, or 99% sequence identity with the amino acid sequence of any one of SEQ ID NOs: 89-100, 105-122, 128-129, 132, 139, 143, 149, 154, 159, 235, 454, 471, 516, 662, 700, 701-716, 739-741, and 766.

[2157] Embodiment 111. The method of embodiment 93, wherein the step of forming an exposed 3′ end in the DNA strand at the target locus comprises nicking the DNA strand with a nuclease.

[2158] Embodiment 112. The method of embodiment 111, wherein the nuclease is the napDNAbp, is provided as a fusion domain of napDNAbp, or is provided in trans.

[2159] Embodiment 113. The method of embodiment 93, wherein the step of forming an exposed 3′ end in the DNA strand at the target locus comprises contacting the DNA strand with a chemical agent.

[2160] Embodiment 114. The method of embodiment 93, wherein the step of forming an exposed 3′ end in the DNA strand at the target locus comprises introducing a replication error.

[2161] Embodiment 115. The method of embodiment 93, wherein the step of contacting the DNA molecule with the napDNAbp and the guide RNA forms an R-loop.

[2162] Embodiment 116. The method of embodiment 115, wherein the DNA strand in which the exposed 3′ end is formed is in the R-loop.

[2163] Embodiment 117. The method of embodiment 93, wherein guide RNA comprises an extended portion that comprises the reverse transcriptase (RT) template sequence.

[2164] Embodiment 118. The method of embodiment 117, wherein the extended portion is at the 3′ end of the guide RNA, the 5′ end of the guide RNA, or at an intramolecular position in the guide RNA.

[2165] Embodiment 119. The method of embodiment 93, wherein the guide RNA further comprises a primer binding site.

[2166] Embodiment 120. The method of embodiment 93, wherein the guide RNA further comprises a spacer sequence.

[2167] Embodiment 121. The method of embodiment 93, wherein the RT template sequence is homologous to the corresponding endogenous DNA.

[2168] Embodiment 122. A method for introducing one or more changes in the nucleotide sequence of a DNA molecule at a target locus by target-primed reverse transcription, the method comprising: (a) contacting the DNA molecule at the target locus with a (i) fusion protein comprising a nucleic acid programmable DNA binding protein (napDNAbp) and a reverse transcriptase and (ii) a guide RNA comprising an RT template comprising a desired nucleotide change; (b) conducting target-primed reverse transcription of the RT template to generate a single strand DNA comprising the desired nucleotide change; and (c) incorporating the desired nucleotide change into the DNA molecule at the target locus through a DNA repair and/or replication process.

[2169] Embodiment 123. The method of embodiment 122, wherein the RT template is located at the 3′ end of the guide RNA, the 5′ end of the guide RNA, or at an intramolecular location in the guide RNA.

[2170] Embodiment 124. The method of embodiment 122, wherein the desired nucleotide change comprises a transition, a transversion, an insertion, or a deletion, or any combination thereof.

[2171] Embodiment 125. The method of claim 122, wherein the desired nucleotide change comprises a transition selected from the group consisting of: (a) T to C; (b) A to G; (c) C to T; and (d) G to A.

[2172] Embodiment 126. The method of claim 122, wherein the desired nucleotide change comprises a transversion selected from the group consisting of: (a) T to A; (b) T to G; (c) C to G; (d) C to A; (e) A to T; (f) A to C; (g) G to C; and (h) G to T.

[2173] Embodiment 127. The method of embodiment 122, wherein the desired nucleotide change comprises changing (1) a G:C basepair to a T:A basepair, (2) a G:C basepair to an A:T basepair, (3) a G:C basepair to C:G basepair, (4) a T:A basepair to a G:C basepair, (5) a T:A basepair to an A:T basepair, (6) a T:A basepair to a C:G basepair, (7) a C:G basepair to a G:C basepair, (8) a C:G basepair to a T:A basepair, (9) a C:G basepair to an A:T basepair, (10) an A:T basepair to a T:A basepair, (11) an A:T basepair to a G:C basepair, or (12) an A:T basepair to a C:G basepair.

[2174] Embodiment 128. A polynucleotide encoding the extended guide RNA of any one of embodiments 31-47.

[2175] Embodiment 129. A vector comprising the polynucleotide of embodiment 128.

[2176] Embodiment 130. A cell comprising the vector of embodiment 129.

[2177] Embodiment 131. The fusion protein of any of embodiments 1-30, wherein the reverse transcriptase is an error-prone reverse transcriptase.

[2178] Embodiment 132. A method for mutagenizing a DNA molecule at a target locus by target-primed reverse transcription, the method comprising: (a) contacting the DNA molecule at the target locus with a (i) fusion protein comprising a nucleic acid programmable DNA binding protein (napDNAbp) and an error-prone reverse transcriptase and (ii) a guide RNA comprising an RT template comprising a desired nucleotide change; (b) conducting target-primed reverse transcription of the RT template to generate a mutagenized single strand DNA; and (c) incorporating the mutagenized single strand DNA into the DNA molecule at the target locus through a DNA repair and/or replication process.

[2179] Embodiment 133. The method of embodiment 132, wherein the fusion protein comprises the amino acid sequence of PE1, PE2, or PE3.

[2180] Embodiment 134. The method of embodiment 132, wherein the napDNAbp is a Cas9 nickase (nCas9).

[2181] Embodiment 135. The method of embodiment 132, wherein the napDNAbp comprises the amino acid sequence of SEQ ID NOs: 18-88, 126, 130, 137, 141, 147, 153, 157, 445, 460, 467, and 482-487.

[2182] Embodiment 136. The method of embodiment 132, wherein the guide RNA comprises SEQ ID NO: 222.

[2183] Embodiment 137. The method of embodiment 132, wherein the step of (b) conducting target-primed reverse transcription comprises generating a 3′ end primer binding sequence at the target locus that is capable of priming reverse transcription by annealing to a primer binding site on the guide RNA.

[2184] Embodiment 138. A method for replacing a trinucleotide repeat expansion mutation in a target DNA molecule with a healthy sequence comprising a healthy number of repeat trinucleotides, the method comprising: (a) contacting the DNA molecule at the target locus with a (i) fusion protein comprising a nucleic acid programmable DNA binding protein (napDNAbp) and a reverse transcriptase and (ii) a guide RNA comprising an RT template comprising the replacement sequence, wherein said fusion protein intr; (b) conducting target-primed reverse transcription of the RT template to generate a single strand DNA comprising the replacement sequence; and (c) incorporating the single strand DNA into the DNA molecule at the target locus through a DNA repair and/or replication process.

[2185] Embodiment 139. The method of embodiment 138, wherein the fusion protein comprises the amino acid sequence of PE1, PE2, or PE3.

[2186] Embodiment 140. The method of embodiment 138, wherein the napDNAbp is a Cas9 nickase (nCas9).

[2187] Embodiment 141. The method of embodiment 138, wherein the napDNAbp comprises the amino acid sequence of SEQ ID NOs: 18-88, 126, 130, 137, 141, 147, 153, 157, 445, 460, 467, and 482-487.

[2188] Embodiment 142. The method of embodiment 138, wherein the guide RNA comprises SEQ ID NO: 222.

[2189] Embodiment 143. The method of embodiment 138, wherein the step of (b) conducting target-primed reverse transcription comprises generating a 3′ end primer binding sequence at the target locus that is capable of priming reverse transcription by annealing to a primer binding site on the guide RNA.

[2190] Embodiment 144. The method of embodiment 138, wherein the trinucleotide repeat expansion mutation is associated with Huntington's Disease, Fragile X syndrome, or Friedreich's ataxia.

[2191] Embodiment 145. The method of embodiment 138, wherein the trinucleotide repeat expansion mutation comprises a repeating unit of CAG triplets.

[2192] Embodiment 146. The method of embodiment 138, wherein the trinucleotide repeat expansion mutation comprises a repeating unit of GAA triplets.

[2193] Embodiment 147. A method of installing a functional moiety in a protein of interest encoded by a target nucleotide sequence by prime editing, the method comprising: (a) contacting the target nucleotide sequence with a (i) prime editor comprising a nucleic acid programmable DNA binding protein (napDNAbp) and a reverse transcriptase and (ii) a PEgRNA comprising an edit template encoding the functional moiety; (b) polymerizing a single strand DNA sequence encoding the functional moiety; and (c) incorporating the single strand DNA sequence in place of a corresponding endogenous strand at the target nucleotide sequence through a DNA repair and/or replication process, wherein the method produces a recombinant target nucleotide sequence that encodes a fusion protein comprising the protein of interest and the functional moiety.

[2194] Embodiment 148. The method of embodiment 147, wherein functional moiety is peptide tag.

[2195] Embodiment 149. The method of embodiment 148, wherein the peptide tag is an affinity tag, solubilization tag, chromatography tag, epitope tag, or a fluorescence tag.

[2196] Embodiment 150. The method of embodiment 148, wherein the peptide tag is selected from the group consisting of: AviTag (SEQ ID NO: 245); C-tag (SEQ ID NO: 246); Calmodulin-tag (SEQ ID NO: 247); polyglutamate tag (SEQ ID NO: 248); E-tag (SEQ ID NO: 249); FLAG-tag (SEQ ID NO: 2); HA-tag (SEQ ID NO: 5); His-tag (SEQ ID NOs: 252-262); Myc-tag (SEQ ID NO: 6); NE-tag (SEQ ID NO: 264); Rho1D4-tag (SEQ ID NO: 265); S-tag (SEQ ID NO: 266); SBP-tag (SEQ ID NO: 267); Softag-1 (SEQ ID NO: 268); Softag-2 (SEQ ID NO: 269); Spot-tag (SEQ ID NO: 270); Strep-tag (SEQ ID NO: 271); TC tag (SEQ ID NO: 272); Ty tag (SEQ ID NO: 273); V5 tag (SEQ ID NO: 3); VSV-tag (SEQ ID NO: 275); and Xpress tag (SEQ ID NO: 276).

[2197] Embodiment 151. The method of embodiment 148, wherein the peptide tag is selected from the group consisting of: AU1 epitope (SEQ ID NO: 278); AU5 epitope (SEQ ID NO: 279); Bacteriophage T7 epitope (T7-tag) (SEQ ID NO: 280); Bluetongue virus tag (B-tag) (SEQ ID NO: 281); E2 epitope (SEQ ID NO: 282); Histidine affinity tag (HAT) (SEQ ID NO: 283); HSV epitope (SEQ ID NO: 284); Polyarginine (Arg-tag) (SEQ ID NO: 285); Polyaspartate (Asp-tag) (SEQ ID NO: 286); Polyphenylalanine (Phe-tag) (SEQ ID NO: 287); S1-tag (SEQ ID NO: 288); S-tag (SEQ ID NO: 266); and VSV-G (SEQ ID NO: 275).

[2198] Embodiment 152. The method of embodiment 147, wherein the functional moiety is an immunoepitope.

[2199] Embodiment 153. The method of embodiment 152, wherein the immunoepitope is selected from the group consisting of: tetanus toxoid (SEQ ID NO: 396); diphtheria toxin mutant CRM197 (SEQ ID NO: 398); mumps immunoepitope 1 (SEQ ID NO: 400); mumps immunoepitope 2 (SEQ ID NO: 402); mumps immunoeptitope 3 (SEQ ID NO: 404); rubella virus (SEQ ID NO: 406); hemagglutinin (SEQ ID NO: 408); neuraminidase (SEQ ID NO: 410); TAP1 (SEQ ID NO: 412); TAP2 (SEQ ID NO: 414); hemagglutinin epitopes toward class I HLA (SEQ ID NO: 416); neuraminidase epitopes toward class I HLA (SEQ ID NO: 418); hemagglutinin epitopes toward class II HLA (SEQ ID NO: 420); neuraminidase epitopes toward class II HLA (SEQ ID NO: 422); hemagglutinin epitope H5N1-bound class I and class II HLA (SEQ ID NO: 424); neuraminidase epitope H5N1-bound class I and class II HLA (SEQ ID NO: 426).

[2200] Embodiment 154. The method of embodiment 147, wherein the functional moiety alters the localization of the protein of interest.

[2201] Embodiment 155. The method of embodiment 147, wherein the functional moiety is a degradation tag such that the degradation rate of the protein of interest is altered.

[2202] Embodiment 156. The method of embodiment 155, wherein the degradation tag comprises an amino acid sequence encoding the degradation tags as disclosed herein.

[2203] Embodiment 157. The method of embodiment 147, wherein the functional moiety is a small molecule binding domain.

[2204] Embodiment 158. The method of embodiment 157, wherein the small molecule binding domain is FKBP12 of SEQ ID NO: 488.

[2205] Embodiment 159. The method of embodiment 157, wherein the small molecule binding domain is FKBP12-F36V of SEQ ID NO: 489.

[2206] Embodiment 160. The method of embodiment 157, wherein the small molecule binding domain is cyclophilin of SEQ ID NOs: 490 and 493-494.

[2207] Embodiment 161. The method of embodiment 157, wherein the small molecule binding domain is installed in two or more proteins of interest.

[2208] Embodiment 162. The method of embodiment 161, wherein the two or more proteins of interest may dimerize upon contacting with a small molecule.

[2209] Embodiment 163. The method of embodiment 157, wherein the small molecule is a dimer of a small molecule selected from the group consisting of those compounds disclosed in Embodiment 163 of Group 1.

[2210] Embodiment 164. A method of installing an immunoepitope in a protein of interest encoded by a target nucleotide sequence by prime editing, the method comprising: (a) contacting the target nucleotide sequence with a (i) prime editor comprising a nucleic acid programmable DNA binding protein (napDNAbp) and a reverse transcriptase and (ii) a PEgRNA comprising an edit template encoding the functional moiety; (b) polymerizing a single strand DNA sequence encoding the immunoepitope; and (c) incorporating the single strand DNA sequence in place of a corresponding endogenous strand at the target nucleotide sequence through a DNA repair and/or replication process, wherein the method produces a recombinant target nucleotide sequence that encodes a fusion protein comprising the protein of interest and the immunoepitope.

[2211] Embodiment 165. The method of embodiment 164, wherein the immunoepitope is selected from the group consisting of: tetanus toxoid (SEQ ID NO: 396); diphtheria toxin mutant CRM197 (SEQ ID NO: 630); mumps immunoepitope 1 (SEQ ID NO: 400); mumps immunoepitope 2 (SEQ ID NO: 402); mumps immunoeptitope 3 (SEQ ID NO: 404); rubella virus (SEQ ID NO: 406); hemagglutinin (SEQ ID NO: 408); neuraminidase (SEQ ID NO: 410); TAP1 (SEQ ID NO: 412); TAP2 (SEQ ID NO: 414); hemagglutinin epitopes toward class I HLA (SEQ ID NO: 416); neuraminidase epitopes toward class I HLA (SEQ ID NO: 418); hemagglutinin epitopes toward class II HLA (SEQ ID NO: 420); neuraminidase epitopes toward class II HLA (SEQ ID NO: 422); hemagglutinin epitope H5N1-bound class I and class II HLA (SEQ ID NO: 424); neuraminidase epitope H5N1-bound class I and class II HLA (SEQ ID NO: 426).

[2212] Embodiment 166. The method of embodiment 164, wherein the fusion protein comprises the amino acid sequence of PE1, PE2, or PE3.

[2213] Embodiment 167. The method of embodiment 164, wherein the napDNAbp is a Cas9 nickase (nCas9).

[2214] Embodiment 168. The method of embodiment 164, wherein the napDNAbp comprises the amino acid sequence of SEQ ID NOs: 18-88, 126, 130, 137, 141, 147, 153, 157, 445, 460, 467, and 482-487.

[2215] Embodiment 169. The method of embodiment 164, wherein the guide RNA comprises SEQ ID NO: 222.

[2216] Embodiment 170. A method of installing a small molecule dimerization domain in a protein of interest encoded by a target nucleotide sequence by prime editing, the method comprising: (a) contacting the target nucleotide sequence with a (i) prime editor comprising a nucleic acid programmable DNA binding protein (napDNAbp) and a reverse transcriptase and (ii) a PEgRNA comprising an edit template encoding the small molecule dimerization domain; (b) polymerizing a single strand DNA sequence encoding the immunoepitope; and (c) incorporating the single strand DNA sequence in place of a corresponding endogenous strand at the target nucleotide sequence through a DNA repair and/or replication process, wherein the method produces a recombinant target nucleotide sequence that encodes a fusion protein comprising the protein of interest and the small molecule dimerization domain.

[2217] Embodiment 171. The method of embodiment 170, further comprising conducting the method on a second protein of interest.

[2218] Embodiment 172. The method of embodiment 171, wherein the first protein of interest and the second protein of interest dimerize in the presence of a small molecule that binds to the dimerization domain on each of said proteins.

[2219] Embodiment 173. The method of embodiment 170, wherein the small molecule binding domain is FKBP12 of SEQ ID NO: 488.

[2220] Embodiment 174. The method of embodiment 170, wherein the small molecule binding domain is FKBP12-F36V of SEQ ID NO: 489.

[2221] Embodiment 175. The method of embodiment 170, wherein the small molecule binding domain is cyclophilin of SEQ ID NOs: 490 and 493-494.

[2222] Embodiment 176. The method of embodiment 170, wherein the small molecule is a dimer of a small molecule selected from the group consisting of those compounds disclosed in Embodiment 163 of Group 1.

[2223] Embodiment 177. The method of embodiment 170, wherein the fusion protein comprises the amino acid sequence of PE1, PE2, or PE3.

[2224] Embodiment 178. The method of embodiment 170, wherein the napDNAbp is a Cas9 nickase (nCas9).

[2225] Embodiment 179. The method of embodiment 170, wherein the napDNAbp comprises the amino acid sequence of SEQ ID NOs: 18-88, 126, 130, 137, 141, 147, 153, 157, 445, 460, 467, and 482-487.

[2226] Embodiment 180. The method of embodiment 170, wherein the guide RNA comprises SEQ ID NO: 222.

[2227] Embodiment 181. A method of installing a peptide tag or epitope onto a protein using prime editing, comprising: contacting a target nucleotide sequence encoding the protein with a prime editor construct configured to insert therein a second nucleotide sequence encoding the peptide tag to result in a recombinant nucleotide sequence, such that the peptide tag and the protein are expressed from the recombinant nucleotide sequence as a fusion protein.

[2228] Embodiment 182. The method of embodiment 181, wherein the peptide tag is used for purification and/or detection of the protein.

[2229] Embodiment 183. The method of embodiment 181, wherein the peptide tag is a poly-histidine (e.g., HHHHHH) (SEQ ID NOs: 252-262), FLAG (e.g., DYKDDDDK) (SEQ ID NO: 2), V5 (e.g., GKPIPNPLLGLDST) (SEQ ID NO: 3), GCN4, HA (e.g., YPYDVPDYA) (SEQ ID NO: 5), Myc (e.g. EQKLISEED) (SEQ ID NO: 6), GST . . . etc.

[2230] Embodiment 184. The method of embodiment 181, wherein the peptide tag has an amino acid sequence selected from the group consisting of SEQ ID NO: 1-6, 245-249, 252-262, 264-273, 275-276, 281, 278-288, and 622.

[2231] Embodiment 185. The method of embodiment 181, wherein the peptide tag is fused to the protein by a linker.

[2232] Embodiment 186. The method of embodiment 181, wherein the fusion protein has the following structure: [protein]-[peptide tag] or [peptide tag]-[protein], wherein “]-[” represents an optional linker.

[2233] Embodiment 187. The method of embodiment 181, wherein the linker has an amino acid sequence of SEQ ID NO: 127, 165-176, 446, 453, and 767-769.

[2234] Embodiment 188. The method of embodiment 181, wherein the prime editor construct comprises a PEgRNA comprising the nucleotide sequence of SEQ ID NOs: 101-104, 181-183, 223-244, 277, 325-334, 336, 338, 340, 342, 344, 346, 348, 350, 352, 354, 356, 358, 360, 362, 364, 366, 368, 499-505, 735-761, 776-777.

[2235] Embodiment 189. The method of embodiment 181, wherein the PEgRNA comprises a spacer, a gRNA core, and an extension arm, wherein the spacer is complementary to the target nucleotide sequence and the extension arm comprises a reverse transcriptase template that encodes the peptide tag.

[2236] Embodiment 190. The method of embodiment 181, wherein the PEgRNA comprises a spacer, a gRNA core, and an extension arm, wherein the spacer is complementary to the target nucleotide sequence and the extension arm comprises a reverse transcriptase template that encodes the peptide tag.

[2237] Embodiment 191. A method of preventing or halting the progression of a prion disease by installing on or more protective mutations into PRNP encoded by a target nucleotide sequence by prime editing, the method comprising: (a) contacting the target nucleotide sequence with a (i) prime editor comprising a nucleic acid programmable DNA binding protein (napDNAbp) and a reverse transcriptase and (ii) a PEgRNA comprising an edit template encoding the functional moiety; (b) polymerizing a single strand DNA sequence encoding the protective mutation; and (c) incorporating the single strand DNA sequence in place of a corresponding endogenous strand at the target nucleotide sequence through a DNA repair and/or replication process, wherein the method produces a recombinant target nucleotide sequence that encodes a PRNP comprising a protective mutation and which is resistant to misfolding.

[2238] Embodiment 192. The method of embodiment 191, wherein the prion disease is a human prion disease.

[2239] Embodiment 193. The method of embodiment 191, wherein the prion disease is an animal prion disease.

[2240] Embodiment 194. The method of embodiment 192, wherein the prion disease is Creutzfeldt-Jakob Disease (CJD), Variant Creutzfeldt-Jakob Disease (vCJD), Gerstmann-Straussler-Scheinker Syndrome, Fatal Familial Insomnia, or Kuru.

[2241] Embodiment 195. The method of embodiment 193, wherein the prion disease is Bovine Spongiform Encephalopathy (BSE or “mad cow disease”), Chronic Wasting Disease (CWD), Scrapie, Transmissible Mink Encephalopathy, Feline Spongiform Encephalopathy, and Ungulate Spongiform Encephalopathy.

[2242] Embodiment 196. The method of embodiment 191, wherein the wildtype PRNP amino acid sequence is SEQ ID NOs: 291-292.

[2243] Embodiment 197. The method of embodiment 191, wherein the method results in a modified PRNP amino acid sequence selected from the group consisting of SEQ ID NOs: 293-309, and 311-323, wherein said modified PRNP protein is resistant to misfolding.

[2244] Embodiment 198. The method of embodiment 191, wherein the fusion protein comprises the amino acid sequence of PE1, PE2, or PE3.

[2245] Embodiment 199. The method of embodiment 191, wherein the napDNAbp is a Cas9 nickase (nCas9).

[2246] Embodiment 200. The method of embodiment 191, wherein the napDNAbp comprises the amino acid sequence of SEQ ID NOs: 18-88, 126, 130, 137, 141, 147, 153, 157, 445, 460, 467, and 482-487.

[2247] Embodiment 201. The method of embodiment 191, wherein the guide RNA comprises SEQ ID NO: 222.

[2248] Embodiment 202. A method of installing a ribonucleotide motif or tag in an RNA of interest encoded by a target nucleotide sequence by prime editing, the method comprising: (a) contacting the target nucleotide sequence with a (i) prime editor comprising a nucleic acid programmable DNA binding protein (napDNAbp) and a reverse transcriptase and (ii) a PEgRNA comprising an edit template encoding the ribonucleotide motif or tag; (b) polymerizing a single strand DNA sequence encoding the ribonucleotide motif or tag; and (c) incorporating the single strand DNA sequence in place of a corresponding endogenous strand at the target nucleotide sequence through a DNA repair and/or replication process, wherein the method produces a recombinant target nucleotide sequence that encodes a modified RNA of interest comprising the ribonucleotide motif or tag.

[2249] Embodiment 203. The method of embodiment 202, wherein ribonucleotide motif or tag is a detection moiety.

[2250] Embodiment 204. The method of embodiment 202, wherein the ribonucleotide motif or tag affects the expression level of the RNA of interest.

[2251] Embodiment 205. The method of embodiment 202, wherein the ribonucleotide motif or tag affects the transport or subcellular location of the RNA of interest.

[2252] Embodiment 206. The method of embodiment 202, wherein the ribonucleotide motif or tag is selected from the group consisting of SV40 type 1, SV40 type 2, SV40 type 3, hGH, BGH, rbGlob, TK, MALAT1 ENE-mascRNA, KSHV PAN ENE, Smbox/U1 snRNA box, U1 snRNA 3′ box, tRNA-lysine, broccoli aptamer, spinach aptamer, mango aptamer, HDV ribozyme, and m6A.

[2253] Embodiment 207. The method of embodiment 202, wherein the PEgRNA comprises SEQ ID NOs: 101-104, 181-183, 223-244, 277, 325-334, 336, 338, 340, 342, 344, 346, 348, 350, 352, 354, 356, 358, 360, 362, 364, 366, 368, 499-505, 735-761, 776-777.

[2254] Embodiment 208. The method of embodiment 202, wherein the fusion protein comprises the amino acid sequence of PE1, PE2, or PE3.

[2255] Embodiment 209. The method of embodiment 202, wherein the napDNAbp is a Cas9 nickase (nCas9).

[2256] Embodiment 210. The method of embodiment 202, wherein the napDNAbp comprises the amino acid sequence of SEQ ID NOs: 18-88, 126, 130, 137, 141, 147, 153, 157, 445, 460, 467, and 482-487.

[2257] Embodiment 211. A method of installing or deleting a functional moiety in a protein of interest encoded by a target nucleotide sequence by prime editing, the method comprising: (a) contacting the target nucleotide sequence with a (i) prime editor comprising a nucleic acid programmable DNA binding protein (napDNAbp) and a reverse transcriptase and (ii) a PEgRNA comprising an edit template encoding the functional moiety or deletion of same; (b) polymerizing a single strand DNA sequence encoding the functional moiety or deletion of same; and (c) incorporating the single strand DNA sequence in place of a corresponding endogenous strand at the target nucleotide sequence through a DNA repair and/or replication process, wherein the method produces a recombinant target nucleotide sequence that encodes a modified protein comprising the protein of interest and the functional moiety or the removal of same, wherein the functional moiety alters a modification state or localization state of the protein.

[2258] Embodiment 212. The method of embodiment 211, wherein functional moiety alters the phosphorylation, ubiquitylation, glycosylation, lipidation, hydroxylation, methylation, acetylation, crotonylation, SUMOylation state of the protein of interest.

[2259] Embodiment 213. A fusion protein comprising a nucleic acid programmable DNA binding protein (napDNAbp) and a polymerase.

[2260] Embodiment 214. The fusion protein of embodiment 213, wherein the fusion protein is capable of carrying out prime editing in the presence of an prime editing guide RNA (PEgRNA).

[2261] Embodiment 215. The fusion protein of embodiment 213, wherein the napDNAbp has a nickase activity.

[2262] Embodiment 216. The fusion protein of embodiment 213, wherein the napDNAbp is a Cas9 protein or variant thereof.

[2263] Embodiment 217. The fusion protein of embodiment 213, wherein the napDNAbp is a nuclease active Cas9, a nuclease inactive Cas9 (dCas9), or a Cas9 nickase (nCas9).

[2264] Embodiment 218. The fusion protein of embodiment 213, wherein the napDNAbp is Cas9 nickase (nCas9).

[2265] Embodiment 219. The fusion protein of embodiment 213, wherein the napDNAbp is selected from the group consisting of: Cas9, Cas12e, Cas12d, Cas12a, Cas12b1, Cas13a, Cas12c, and Argonaute and optionally has a nickase activity.

[2266] Embodiment 220. The fusion protein of embodiment 213, wherein the fusion protein when complexed with a PEgRNA is capable of binding to a target DNA sequence.

[2267] Embodiment 221. The fusion protein of embodiment 220, wherein the target DNA sequence comprises a target strand and a complementary non-target strand.

[2268] Embodiment 222. The fusion protein of embodiment 220, wherein the binding of the fusion protein complexed to the PEgRNA forms an R-loop.

[2269] Embodiment 223. The fusion protein of embodiment 222, wherein the R-loop comprises (i) an RNA-DNA hybrid comprising the PEgRNA and the target strand, and (ii) the complementary non-target strand.

[2270] Embodiment 224. The fusion protein of embodiment 223, wherein the complementary non-target strand is nicked to form a priming sequence having a free 3′ end.

[2271] Embodiment 225. The fusion protein of embodiment 214, wherein the PEgRNA comprises (a) a guide RNA and (b) an extension arm at the 5′ or the 3′ end of the guide RNA, or at an intramolecular location in the guide RNA.

[2272] Embodiment 226. The fusion protein of embodiment 225, wherein the extension arm comprises (i) a DNA synthesis template sequence comprising a desired nucleotide change, and (ii) a primer binding site.

[2273] Embodiment 227. The fusion protein of embodiment 226, wherein the DNA synthesis template sequence encodes a single-strand DNA flap that is complementary to an endogenous DNA sequence adjacent to the nick site, wherein the single-strand DNA flap comprises the desired nucleotide change.

[2274] Embodiment 228. The fusion protein of embodiment 225, wherein the extension arm is at least 5 nucleotides, at least 6 nucleotides, at least 7 nucleotides, at least 8 nucleotides, at least 9 nucleotides, at least 10 nucleotides, at least 11 nucleotides, at least 12 nucleotides, at least 13 nucleotides, at least 14 nucleotides, at least 15 nucleotides, at least 16 nucleotides, at least 17 nucleotides, at least 18 nucleotides, at least 19 nucleotides, at least 20 nucleotides, at least 21 nucleotides, at least 22 nucleotides, at least 23 nucleotides, at least 24 nucleotides, or at least 25 nucleotides in length.

[2275] Embodiment 229. The fusion protein of embodiment 227, wherein the single-strand DNA flap hybridizes to the endogenous DNA sequence adjacent to the nick site, thereby installing the desired nucleotide change.

[2276] Embodiment 230. The fusion protein of embodiment 227, wherein the single-stranded DNA flap displaces the endogenous DNA sequence adjacent to the nick site and which has a free 5′ end.

[2277] Embodiment 231. The fusion protein of embodiment 230, wherein the endogenous DNA sequence having the 5′ end is excised by the cell.

[2278] Embodiment 232. The fusion protein of embodiment 230, wherein cellular repair of the single-strand DNA flap results in installation of the desired nucleotide change, thereby forming a desired product.

[2279] Embodiment 233. The fusion protein of embodiment 226, wherein the desired nucleotide change is installed in an editing window that is between about −4 to +10 of the PAM sequence, or between about −10 to +20 of the PAM sequence, or between about −20 to +40 of the PAM sequence, or between about −30 to +100 of the PAM sequence, or wherein the desired nucleotide change is installed at least 1, 2, 3, 4, 5, 6, 7, 8, 9, 10, 11, 12, 13, 14, 15, 16, 17, 18, 19, 20, 21, 22, 23, 24, 25, 26, 27, 28, 29, 30, 31, 32, 33, 34, 35, 36, 37, 38, 39, 40, 41, 42, 43, 44, 45, 46, 47, 48, 49, 50, 51, 52, 53, 54, 55, 56, 57, 58, 59, 60, 61, 62, 63, 64, 65, 66, 67, 68, 69, 70, 71, 72, 73, 74, 75, 76, 77, 78, 79, 80, 81, 82, 83, 84, 85, 86, 87, 88, 89, 90, 91, 92, 93, 94, 95, 96, 97, 98, 99, or 100 nucleotides downstream of the nick site.

[2280] Embodiment 234. The fusion protein of embodiment 213, wherein the napDNAbp comprises an amino acid sequence of SEQ ID NO: 18, or an amino acid sequence having at least 80%, 85%, 90%, 95%, 98%, or 99% sequence identity with the amino acid sequence to SEQ ID NO: 18.

[2281] Embodiment 235. The fusion protein of embodiment 213, wherein the napDNAbp comprises an amino acid sequence having at least 80%, 85%, 90%, 95%, 98%, or 99% sequence identity with the amino acid sequence of any one of SEQ ID NOs: 18-88, 126, 130, 137, 141, 147, 153, 157, 445, 460, 467, and 482-487.

[2282] Embodiment 236. The fusion protein of embodiment 213, wherein the polymerase is a reverse transcriptase comprising any one of the amino acid sequences of SEQ ID NOs: 89-100, 105-122, 128-129, 132, 139, 143, 149, 154, 159, 235, 454, 471, 516, 662, 700, 701-716, 739-741, and 766.

[2283] Embodiment 237. The fusion protein of embodiment 213, wherein the polymerase is a reverse transcriptase comprising an amino acid sequence having at least 80%, 85%, 90%, 95%, 98%, or 99% sequence identity with the amino acid sequence of any one of SEQ ID NOs: 89-100, 105-122, 128-129, 132, 139, 143, 149, 154, 159, 235, 454, 471, 516, 662, 700, 701-716, 739-741, and 766.

[2284] Embodiment 238. The fusion protein of embodiment 213, wherein the polymerase is a naturally-occurring reverse transcriptase from a retrovirus or a retrotransposon.

[2285] Embodiment 239. The fusion protein of any one of the previous embodiments, wherein the fusion protein comprises the structure NH2-[napDNAbp]-[polymerase]-COOH; or NH2-[polymerase]-[napDNAbp]-COOH, wherein each instance of “]-[” indicates the presence of an optional linker sequence.

[2286] Embodiment 240. The fusion protein of embodiment 239, wherein the linker sequence comprises an amino acid sequence of SEQ ID NOs: 127, 165-176, 446, 453, and 767-769.

[2287] Embodiment 241. The fusion protein of embodiment 226, wherein the desired nucleotide change is a single nucleotide change, an insertion of one or more nucleotides, or a deletion of one or more nucleotides.

[2288] Embodiment 242. The fusion protein of embodiment 241, wherein the insert or deletion is at least 1, at least 2, at least 3, at least 4, at least 5, at least 6, at least 7, at least 8, at least 9, at least 10, at least 11, at least 12, at least 13, at least 14, at least 15, at least 16, at least 17, at least 18, at least 19, at least 20, at least 21, at least 22, at least 23, at least 24, at least 25, at least 26, at least 27, at least 28, at least 29, at least 30, at least 31, at least 32, at least 33, at least 34, at least 35, at least 36, at least 37, at least 38, at least 39, at least 40, at least 41, at least 42, at least 43, at least 44, at least 45, at least 46, at least 47, at least 48, at least 49, or at least 50.

[2289] Embodiment 243. A PEgRNA comprising a guide RNA and at least one nucleic acid extension arm comprising a DNA synthesis template.

[2290] Embodiment 244. The PEgRNA of embodiment 241, wherein the nucleic acid extension arm is position at the 3′ or 5′ end of the guide RNA, or at an intramolecular position in the guide RNA, and wherein the nucleic acid extension arm is DNA or RNA.

[2291] Embodiment 245. The PEgRNA of embodiment 242, wherein the PEgRNA is capable of binding to a napDNAbp and directing the napDNAbp to a target DNA sequence.

[2292] Embodiment 246. The PEgRNA of embodiment 245, wherein the target DNA sequence comprises a target strand and a complementary non-target strand, wherein the guide RNA hybridizes to the target strand to form an RNA-DNA hybrid and an R-loop.

[2293] Embodiment 247. The PEgRNA of embodiment 243, wherein the at least one nucleic acid extension arm comprises (i) a DNA synthesis template, and (ii) a primer binding site.

[2294] Embodiment 248. The PEgRNA of embodiment 247, wherein the nucleic acid extension arm is at least 5 nucleotides, at least 6 nucleotides, at least 7 nucleotides, at least 8 nucleotides, at least 9 nucleotides, at least 10 nucleotides, at least 11 nucleotides, at least 12 nucleotides, at least 13 nucleotides, at least 14 nucleotides, at least 15 nucleotides, at least 16 nucleotides, at least 17 nucleotides, at least 18 nucleotides, at least 19 nucleotides, at least 20 nucleotides, at least 21 nucleotides, at least 22 nucleotides, at least 23 nucleotides, at least 24 nucleotides, or at least 25 nucleotides in length.

[2295] Embodiment 249. The PEgRNA of embodiment 247, wherein the DNA synthesis template is at least 3 nucleotides, at least 4 nucleotides, at least 5 nucleotides, at least 6 nucleotides, at least 7 nucleotides, at least 8 nucleotides, at least 9 nucleotides, at least 10 nucleotides, at least 11 nucleotides, at least 12 nucleotides, at least 13 nucleotides, at least 14 nucleotides, or at least 15 nucleotides in length.

[2296] Embodiment 250. The PEgRNA of embodiment 247, wherein the primer binding site is at least 3 nucleotides, at least 4 nucleotides, at least 5 nucleotides, at least 6 nucleotides, at least 7 nucleotides, at least 8 nucleotides, at least 9 nucleotides, at least 10 nucleotides, at least 11 nucleotides, at least 12 nucleotides, at least 13 nucleotides, at least 14 nucleotides, or at least 15 nucleotides in length.

[2297] Embodiment 251. The PEgRNA of embodiment 243, further comprising at least one additional structure selected from the group consisting of a linker, a stem loop, a hairpin, a toeloop, an aptamer, or an RNA-protein recruitment domain.

[2298] Embodiment 252. The PEgRNA of embodiment 247, wherein the DNA synthesis template encodes a single-strand DNA flap that is complementary to an endogenous DNA sequence adjacent to a nick site, wherein the single-strand DNA flap comprises a desired nucleotide change.

[2299] Embodiment 253. The PEgRNA of embodiment 252, wherein the single-stranded DNA flap displaces an endogenous single-strand DNA having a 5′ end in the target DNA sequence that has been nicked, and wherein the endogenous single-strand DNA is immediately adjacent downstream of the nick site.

[2300] Embodiment 254. The PEgRNA of embodiment 253, wherein the endogenous single-stranded DNA having the free 5′ end is excised by the cell.

[2301] Embodiment 255. The PEgRNA of embodiment 253, wherein cellular repair of the single-strand DNA flap results in installation of the desired nucleotide change, thereby forming a desired product.

[2302] Embodiment 256. The PEgRNA of embodiment 243, comprising the nucleotide sequence of SEQ ID NOs: 101-104, 181-183, 223-244, 277, 325-334, 336, 338, 340, 342, 344, 346, 348, 350, 352, 354, 356, 358, 360, 362, 364, 366, 368, 499-505, 735-761, 776-777, or a nucleotide sequence having at least 85%, or at least 90%, or at least 95%, or at least 98%, or at least 99% sequence identity with any one of SEQ ID NOs: 101-104, 181-183, 223-244, 277, 325-334, 336, 338, 340, 342, 344, 346, 348, 350, 352, 354, 356, 358, 360, 362, 364, 366, 368, 499-505, 735-761, 776-777.

[2303] Embodiment 257. The PEgRNA of embodiment 247, wherein the DNA synthesis template comprises a nucleotide sequence that is at least 80%, or 85%, or 90%, or 95%, or 99% identical to the endogenous DNA target.

[2304] Embodiment 258. The PEgRNA of embodiment 247, wherein the primer binding site hybridizes with a free 3′ end of the cut DNA.

[2305] Embodiment 259. The PEgRNA of embodiment 251, wherein the at least one additional structure is located at the 3′ or 5′ end of the PEgRNA.

[2306] Embodiment 260. A complex comprising a fusion protein of any one of embodiments 213-242 and an PEgRNA.

[2307] Embodiment 261. The complex of embodiment 260, wherein the PEgRNA comprises a guide RNA and an nucleic acid extension arm at the 3′ or 5′ end of the guide RNA or at an intramolecular position in the guide RNA.

[2308] Embodiment 262. The complex of embodiment 260, wherein the PEgRNA is capable of binding to a napDNAbp and directing the napDNAbp to a target DNA sequence.

[2309] Embodiment 263. The complex of embodiment 262, wherein the target DNA sequence comprises a target strand and a complementary non-target strand, wherein the guide RNA hybridizes to the target strand to form an RNA-DNA hybrid and an R-loop.

[2310] Embodiment 264. The complex of embodiment 261, wherein the at least one nucleic acid extension arm comprises (i) a DNA synthesis template, and (ii) a primer binding site.

[2311] Embodiment 265. The complex of embodiment 260, wherein the PEgRNA comprises the nucleotide sequence of SEQ ID NOs: 101-104, 181-183, 223-244, 277, 325-334, 336, 338, 340, 342, 344, 346, 348, 350, 352, 354, 356, 358, 360, 362, 364, 366, 368, 499-505, 735-761, 776-777, or a nucleotide sequence having at least 85%, or at least 90%, or at least 95%, or at least 98%, or at least 99% sequence identity with any one of SEQ ID NOs: 101-104, 181-183, 223-244, 277, 325-334, 336, 338, 340, 342, 344, 346, 348, 350, 352, 354, 356, 358, 360, 362, 364, 366, 368, 499-505, 735-761, 776-777.

[2312] Embodiment 266. The complex of embodiment 264, wherein the DNA synthesis template comprises a nucleotide sequence that is at least 80%, or 85%, or 90%, or 95%, or 99% identical to the endogenous DNA target.

[2313] Embodiment 267. The complex of embodiment 264, wherein the primer binding site hybridizes with a free 3′ end of the cut DNA.

[2314] Embodiment 268. A complex comprising a napDNAbp and an PEgRNA.

[2315] Embodiment 269. The complex of embodiment 268, wherein the napDNAbp is a Cas9 nickase.

[2316] Embodiment 270. The complex of embodiment 268, wherein the napDNAbp comprises an amino acid sequence of SEQ ID NO: 18.

[2317] Embodiment 271. The complex of embodiment 268, wherein the napDNAbp comprises an amino acid sequence having at least 80%, 85%, 90%, 95%, 98%, or 99% sequence identity with the amino acid sequence of any one of SEQ ID NOs: 18-88, 126, 130, 137, 141, 147, 153, 157, 445, 460, 467, and 482-487.

[2318] Embodiment 272. The complex of embodiment 268, wherein the PEgRNA comprises a guide RNA and a nucleic acid extension arm at the 3′ or 5′ end of the guide RNA, or at an intramolecular position in the guide RNA.

[2319] Embodiment 273. The complex of embodiment 268, wherein the PEgRNA is capable of directing the napDNAbp to a target DNA sequence.

[2320] Embodiment 274. The complex of embodiment 272, wherein the target DNA sequence comprises a target strand and a complementary non-target strand, wherein the spacer sequence of the PEgRNA hybridizes to the target strand to form an RNA-DNA hybrid and an R-loop.

[2321] Embodiment 275. The complex of embodiment 273, wherein the nucleic acid extension arm comprises (i) a DNA synthesis template, and (ii) a primer binding site.

[2322] Embodiment 276. The complex of embodiment 269, wherein the PEgRNA comprises the nucleotide sequence of SEQ ID NOs: 101-104, 181-183, 223-244, 277, 325-334, 336, 338, 340, 342, 344, 346, 348, 350, 352, 354, 356, 358, 360, 362, 364, 366, 368, 499-505, 735-761, 776-777, or a nucleotide sequence having at least 85%, or at least 90%, or at least 95%, or at least 98%, or at least 99% sequence identity with any one of SEQ ID NOs: 101-104, 181-183, 223-244, 277, 325-334, 336, 338, 340, 342, 344, 346, 348, 350, 352, 354, 356, 358, 360, 362, 364, 366, 368, 499-505, 735-761, 776-777.

[2323] Embodiment 277. The complex of embodiment 276, wherein the DNA synthesis template comprises a nucleotide sequence that is at least 80%, or 85%, or 90%, or 95%, or 99% identical to the endogenous DNA target.

[2324] Embodiment 278. The complex of embodiment 276, wherein the primer binding site hybridizes with a free 3′ end of the cut DNA.

[2325] Embodiment 279. The complex of embodiment 276, wherein the PEgRNA further comprises at least one additional structure selected from the group consisting of a linker, a stem loop, a hairpin, a toeloop, an aptamer, or an RNA-protein recruitment domain.

[2326] Embodiment 280. A polynucleotide encoding the fusion protein of any of embodiments 213-242.

[2327] Embodiment 281. A vector comprising the polynucleotide of embodiment 280.

[2328] Embodiment 282. A cell comprising the fusion protein of any of embodiments 213-242 and an PEgRNA bound to the napDNAbp of the fusion protein.

[2329] Embodiment 283. A cell comprising a complex of any one of embodiments 260-279.

[2330] Embodiment 284. A pharmaceutical composition comprising: (i) a fusion protein of any of embodiments 213-242, the complex of embodiments 260-279, the polynucleotide of embodiment 68, or the vector of embodiment 69; and (ii) a pharmaceutically acceptable excipient.

[2331] Embodiment 285. A pharmaceutical composition comprising: (i) the complex of embodiments 260-279 (ii) a polymerase provided in trans; and (iii) a pharmaceutically acceptable excipient.

[2332] Embodiment 286. A kit comprising a nucleic acid construct, comprising: (i) a nucleic acid sequencing encoding the fusion protein of any one of embodiments 213-242; and (ii) a promoter that drives expression of the sequence of (i).

[2333] Embodiment 287. A method for installing a desired nucleotide change in a double-stranded DNA sequence, the method comprising:

[2334] (i) contacting the double-stranded DNA sequence with a complex comprising a fusion protein and a PEgRNA, wherein the fusion protein comprises a napDNAbp and a polymerase and wherein the PEgRNA comprises a DNA synthesis template comprising the desired nucleotide change and a primer binding site;

[2335] (ii) nicking the double-stranded DNA sequence, thereby generating a free single-strand DNA having a 3′ end;

[2336] (iii) hybridizing the 3′ end of the free single-strand DNA to the primer binding site, thereby priming the polymerase;

[2337] (iv) polymerizing a strand of DNA from the 3′ end hybridized to the primer binding site, thereby generating a single-strand DNA flap comprising the desired nucleotide change and which is complementary to the DNA synthesis template;

[2338] (v) replacing an endogenous DNA strand adjacent the cut site with the single-strand DNA flap, thereby installing the desired nucleotide change in the double-stranded DNA sequence.

[2339] Embodiment 288. The method of embodiment 287, wherein the step of (v) replacing comprises: (i) hybridizing the single-strand DNA flap to the endogenous DNA strand adjacent the cut site to create a sequence mismatch; (ii) excising the endogenous DNA strand; and (iii) repairing the mismatch to form the desired product comprising the desired nucleotide change in both strands of DNA.

[2340] Embodiment 289. The method of embodiment 288, wherein the desired nucleotide change is a single nucleotide substitution, a deletion, or an insertion.

[2341] Embodiment 290. The method of embodiment 289, wherein the single nucleotide substitution is a transition or a transversion.

[2342] Embodiment 291. The method of embodiment 288, wherein the desired nucleotide change is (1) a G to T substitution, (2) a G to A substitution, (3) a G to C substitution, (4) a T to G substitution, (5) a T to A substitution, (6) a T to C substitution, (7) a C to G substitution, (8) a C to T substitution, (9) a C to A substitution, (10) an A to T substitution, (11) an A to G substitution, or (12) an A to C substitution.

[2343] Embodiment 292. The method of embodiment 288, wherein the desired nucleoid change converts (1) a G:C basepair to a T:A basepair, (2) a G:C basepair to an A:T basepair, (3) a G:C basepair to C:G basepair, (4) a T:A basepair to a G:C basepair, (5) a T:A basepair to an A:T basepair, (6) a T:A basepair to a C:G basepair, (7) a C:G basepair to a G:C basepair, (8) a C:G basepair to a T:A basepair, a C:G basepair to an A:T basepair, (10) an A:T basepair to a T:A basepair, (11) an A:T basepair to a G:C basepair, or (12) an A:T basepair to a C:G basepair.

[2344] Embodiment 293. The method of embodiment 288, wherein the desired nucleotide change is an insertion or deletion of 1, 2, 3, 4, 5, 6, 7, 8, 9, 10, 11, 12, 13, 14, 15, 16, 17, 18, 19, 20, 21, 22, 23, 24, or 25 nucleotides.

[2345] Embodiment 294. The method of embodiment 288, wherein the desired nucleotide change corrects a disease-associated gene.

[2346] Embodiment 295. The method of embodiment 294, wherein the disease-associated gene is associated with a monogentic disorder selected from the group consisting of: Adenosine Deaminase (ADA) Deficiency; Alpha-1 Antitrypsin Deficiency; Cystic Fibrosis; Duchenne Muscular Dystrophy; Galactosemia; Hemochromatosis; Huntington's Disease; Maple Syrup Urine Disease; Marfan Syndrome; Neurofibromatosis Type 1; Pachyonychia Congenita; Phenylkeotnuria; Severe Combined Immunodeficiency; Sickle Cell Disease; Smith-Lemli-Opitz Syndrome; a trinucleotide repeat disorder; a prion disease; and Tay-Sachs Disease.

[2347] Embodiment 296. The method of embodiment 294, wherein the disease-associated gene is associated with a polygenic disorder selected from the group consisting of: heart disease; high blood pressure; Alzheimer's disease; arthritis; diabetes; cancer; and obesity.

[2348] Embodiment 297. The method of embodiment 287, wherein the napDNAbp is a nuclease dead Cas9 (dCas9), a Cas9 nickase (nCas9), or a nuclease active Cas9.

[2349] Embodiment 298. The method of embodiment 287, wherein the napDNAbp comprises an amino acid sequence of SEQ ID NO: 18, or an amino acid sequence having at least 80%, 85%, 90%, 95%, 98%, or 99% sequence identity with the amino acid sequence of SEQ ID NO: 18.

[2350] Embodiment 299. The method of embodiment 287, wherein the napDNAbp comprises an amino acid sequence having at least 80%, 85%, 90%, 95%, 98%, or 99% sequence identity with the amino acid sequence of any one of SEQ ID NOs: 18-88, 126, 130, 137, 141, 147, 153, 157, 445, 460, 467, and 482-487.

[2351] Embodiment 300. The method of embodiment 287, wherein the polymerase is a reverse transcriptase comprising any one of the amino acid sequences of SEQ ID NOs: 89-100, 105-122, 128-129, 132, 139, 143, 149, 154, 159, 235, 454, 471, 516, 662, 700, 701-716, 739-741, and 766.

[2352] Embodiment 301. The method of embodiment 287, wherein the polymerase is a reverse transcriptase comprising an amino acid sequence having at least 80%, 85%, 90%, 95%, 98%, or 99% sequence identity with the amino acid sequence of any one of SEQ ID NOs: 89-100, 105-122, 128-129, 132, 139, 143, 149, 154, 159, 235, 454, 471, 516, 662, 700, 701-716, 739-741, and 766.

[2353] Embodiment 302. The method of embodiment 287, wherein the PEgRNA comprises a nucleic acid extension arm at the 3′ or 5′ ends or at an intramolecular location in the guide RNA, wherein the extension arm comprises the DNA synthesis template sequence and the primer binding site.

[2354] Embodiment 303. The method of embodiment 302, wherein the extension arm is at least 5 nucleotides, at least 6 nucleotides, at least 7 nucleotides, at least 8 nucleotides, at least 9 nucleotides, at least 10 nucleotides, at least 11 nucleotides, at least 12 nucleotides, at least 13 nucleotides, at least 14 nucleotides, at least 15 nucleotides, at least 16 nucleotides, at least 17 nucleotides, at least 18 nucleotides, at least 19 nucleotides, at least 20 nucleotides, at least 21 nucleotides, at least 22 nucleotides, at least 23 nucleotides, at least 24 nucleotides, or at least 25 nucleotides in length.

[2355] Embodiment 304. The method of embodiment 287, wherein the PEgRNA has a nucleotide sequence selected from the group consisting of SEQ ID NOs: 101-104, 181-183, 223-244, 277, 325-334, 336, 338, 340, 342, 344, 346, 348, 350, 352, 354, 356, 358, 360, 362, 364, 366, 368, 499-505, 735-761, 776-777.

[2356] Embodiment 305. A method for introducing one or more changes in the nucleotide sequence of a DNA molecule at a target locus, comprising:

[2357] (i) contacting the DNA molecule with a nucleic acid programmable DNA binding protein (napDNAbp) and a PEgRNA which targets the napDNAbp to the target locus, wherein the PEgRNA comprises a reverse transcriptase (RT) template sequence comprising at least one desired nucleotide change and a primer binding site;

[2358] (ii) forming an exposed 3′ end in a DNA strand at the target locus;

[2359] (iii) hybridizing the exposed 3′ end to the primer binding site to prime reverse transcription;

[2360] (iv) synthesizing a single strand DNA flap comprising the at least one desired nucleotide change based on the RT template sequence by reverse transcriptase;

[2361] (v) and incorporating the at least one desired nucleotide change into the corresponding endogenous DNA, thereby introducing one or more changes in the nucleotide sequence of the DNA molecule at the target locus.

[2362] Embodiment 306. The method of embodiment 305, wherein the one or more changes in the nucleotide sequence comprises a transition.

[2363] Embodiment 307. The method of embodiment 306, wherein the transition is selected from the group consisting of: (a) T to C; (b) A to G; (c) C to T; and (d) G to A.

[2364] Embodiment 308. The method of embodiment 305, wherein the one or more changes in the nucleotide sequence comprises a transversion.

[2365] Embodiment 309. The method of embodiment 308, wherein the transversion is selected from the group consisting of: (a) T to A; (b) T to G; (c) C to G; (d) C to A; (e) A to T; (f) A to C; (g) G to C; and (h) G to T.

[2366] Embodiment 310. The method of embodiment 305, wherein the one or more changes in the nucleotide sequence comprises changing (1) a G:C basepair to a T:A basepair, (2) a G:C basepair to an A:T basepair, (3) a G:C basepair to C:G basepair, (4) a T:A basepair to a G:C basepair, (5) a T:A basepair to an A:T basepair, (6) a T:A basepair to a C:G basepair, (7) a C:G basepair to a G:C basepair, (8) a C:G basepair to a T:A basepair, (9) a C:G basepair to an A:T basepair, (9) an A:T basepair to a T:A basepair, (11) an A:T basepair to a G:C basepair, or (12) an A:T basepair to a C:G basepair.

[2367] Embodiment 311. The method of embodiment 305, wherein the one or more changes in the nucleotide sequence comprises an insertion or deletion of 1, 2, 3, 4, 5, 6, 7, 8, 9, 10, 11, 12, 13, 14, 15, 16, 17, 18, 19, 20, 21, 22, 23, 24, or 25 nucleotides.

[2368] Embodiment 312. The method of embodiment 305, wherein the one or more changes in the nucleotide sequence comprises a correction to a disease-associated gene.

[2369] Embodiment 313. The method of embodiment 312, wherein the disease-associated gene is associated with a monogentic disorder selected from the group consisting of: Adenosine Deaminase (ADA) Deficiency; Alpha-1 Antitrypsin Deficiency; Cystic Fibrosis; Duchenne Muscular Dystrophy; Galactosemia; Hemochromatosis; Huntington's Disease; Maple Syrup Urine Disease; Marfan Syndrome; Neurofibromatosis Type 1; Pachyonychia Congenita; Phenylkeotnuria; Severe Combined Immunodeficiency; Sickle Cell Disease; Smith-Lemli-Opitz Syndrome; a trinucleotide repeat disorder; a prion disease; and Tay-Sachs Disease.

[2370] Embodiment 314. The method of embodiment 312, wherein the disease-associated gene is associated with a polygenic disorder selected from the group consisting of: heart disease; high blood pressure; Alzheimer's disease; arthritis; diabetes; cancer; and obesity.

[2371] Embodiment 315. The method of embodiment 305, wherein the napDNAbp is a nuclease active Cas9 or variant thereof.

[2372] Embodiment 316. The method of embodiment 305, wherein the napDNAbp is a nuclease inactive Cas9 (dCas9) or Cas9 nickase (nCas9), or a variant thereof.

[2373] Embodiment 317. The method of embodiment 305, wherein the napDNAbp comprises an amino acid sequence of SEQ ID NO: 18, or an amino acid sequence having at least 80%, 85%, 90%, 95%, 98%, or 99% sequence identity with SEQ ID NO: 18.

[2374] Embodiment 318. The method of embodiment 305, wherein the napDNAbp comprises an amino acid sequence having at least 80%, 85%, 90%, 95%, 98%, or 99% sequence identity with the amino acid sequence of any one of SEQ ID NOs: 18-88, 126, 130, 137, 141, 147, 153, 157, 445, 460, 467, and 482-487.

[2375] Embodiment 319. The method of embodiment 305, wherein the reverse transcriptase is introduced in trans.

[2376] Embodiment 320. The method of embodiment 305, wherein the napDNAbp comprises a fusion to a reverse transcriptase.

[2377] Embodiment 321. The method of embodiment 305, wherein the reverse transcriptase comprises any one of the amino acid sequences of SEQ ID NOs: 89-100, 105-122, 128-129, 132, 139, 143, 149, 154, 159, 235, 454, 471, 516, 662, 700, 701-716, 739-741, and 766.

[2378] Embodiment 322. The method of embodiment 305, wherein the reverse transcriptase comprises an amino acid sequence having at least 80%, 85%, 90%, 95%, 98%, or 99% sequence identity with the amino acid sequence of any one of SEQ ID NOs: 89-100, 105-122, 128-129, 132, 139, 143, 149, 154, 159, 235, 454, 471, 516, 662, 700, 701-716, 739-741, and 766.

[2379] Embodiment 323. The method of embodiment 305, wherein the step of forming an exposed 3′ end in the DNA strand at the target locus comprises nicking the DNA strand with a nuclease.

[2380] Embodiment 324. The method of embodiment 323, wherein the nuclease is provided is provided in trans.

[2381] Embodiment 325. The method of embodiment 305, wherein the step of forming an exposed 3′ end in the DNA strand at the target locus comprises contacting the DNA strand with a chemical agent.

[2382] Embodiment 326. The method of embodiment 305, wherein the step of forming an exposed 3′ end in the DNA strand at the target locus comprises introducing a replication error.

[2383] Embodiment 327. The method of embodiment 305, wherein the step of contacting the DNA molecule with the napDNAbp and the guide RNA forms an R-loop.

[2384] Embodiment 328. The method of embodiment 327, wherein the DNA strand in which the exposed 3′ end is formed is in the R-loop.

[2385] Embodiment 329. The method of embodiment 315, wherein the PEgRNA comprises an extension arm that comprises the reverse transcriptase (RT) template sequence and the primer binding site.

[2386] Embodiment 330. The method of embodiment 329, wherein the extension arm is at the 3′ end of the guide RNA, the 5′ end of the guide RNA, or at an intramolecular position in the guide RNA.

[2387] Embodiment 331. The method of embodiment 305, wherein the PEgRNA further comprises at least one additional structure selected from the group consisting of a linker, a stem loop, a hairpin, a toeloop, an aptamer, or an RNA-protein recruitment domain.

[2388] Embodiment 332. The method of embodiment 305, wherein the PEgRNA further comprises a homology arm.

[2389] Embodiment 333. The method of embodiment 305, wherein the RT template sequence is homologous to the corresponding endogenous DNA.

[2390] Embodiment 334. A method for introducing one or more changes in the nucleotide sequence of a DNA molecule at a target locus by target-primed reverse transcription, the method comprising: (a) contacting the DNA molecule at the target locus with a (i) fusion protein comprising a nucleic acid programmable DNA binding protein (napDNAbp) and a reverse transcriptase and (ii) a guide RNA comprising an RT template comprising a desired nucleotide change; (b) conducting target-primed reverse transcription of the RT template to generate a single strand DNA comprising the desired nucleotide change; and (c) incorporating the desired nucleotide change into the DNA molecule at the target locus through a DNA repair and/or replication process.

[2391] Embodiment 335. The method of embodiment 334, wherein the RT template is located at the 3′ end of the guide RNA, the 5′ end of the guide RNA, or at an intramolecular location in the guide RNA.

[2392] Embodiment 336. The method of embodiment 334, wherein the desired nucleotide change comprises a transition, a transversion, an insertion, or a deletion, or any combination thereof.

[2393] Embodiment 337. The method of embodiment 334, wherein the desired nucleotide change comprises a transition selected from the group consisting of: (a) T to C; (b) A to G; (c) C to T; and (d) G to A.

[2394] Embodiment 338. The method of claim 334, wherein the desired nucleotide change comprises a transversion selected from the group consisting of: (a) T to A; (b) T to G; (c) C to G; (d) C to A; (e) A to T; (f) A to C; (g) G to C; and (h) G to T.

[2395] Embodiment 339. The method of embodiment 334, wherein the desired nucleotide change comprises changing (1) a G:C basepair to a T:A basepair, (2) a G:C basepair to an A:T basepair, (3) a G:C basepair to C:G basepair, (4) a T:A basepair to a G:C basepair, (5) a T:A basepair to an A:T basepair, (6) a T:A basepair to a C:G basepair, (7) a C:G basepair to a G:C basepair, (8) a C:G basepair to a T:A basepair, (9) a C:G basepair to an A:T basepair, (10) an A:T basepair to a T:A basepair, (11) an A:T basepair to a G:C basepair, or (12) an A:T basepair to a C:G basepair.

[2396] Embodiment 340. A polynucleotide encoding the PEgRNA of any one of embodiments 243-259.

[2397] Embodiment 341. A vector comprising the polynucleotide of embodiment 340.

[2398] Embodiment 342. A cell comprising the vector of embodiment 341.

[2399] Embodiment 343. The fusion protein of embodiment 213, wherein the polymerase is an error-prone reverse transcriptase.

[2400] Embodiment 344. A method for mutagenizing a DNA molecule at a target locus by target-primed reverse transcription, the method comprising: (a) contacting the DNA molecule at the target locus with a (i) fusion protein comprising a nucleic acid programmable DNA binding protein (napDNAbp) and an error-prone reverse transcriptase and (ii) a guide RNA comprising an RT template comprising a desired nucleotide change; (b) conducting target-primed reverse transcription of the RT template to generate a mutagenized single strand DNA; and (c) incorporating the mutagenized single strand DNA into the DNA molecule at the target locus through a DNA repair and/or replication process.

[2401] Embodiment 345. The method of any prior embodiment, wherein the fusion protein comprises the amino acid sequence of PE1, PE2, or PE3.

[2402] Embodiment 346. The method of any prior embodiment, wherein the napDNAbp is a Cas9 nickase (nCas9).

[2403] Embodiment 347. The method of embodiment 344, wherein the napDNAbp comprises the amino acid sequence of SEQ ID NOs: 18-88, 126, 130, 137, 141, 147, 153, 157, 445, 460, 467, and 482-487.

[2404] Embodiment 348. The method of embodiment 344, wherein the guide RNA comprises SEQ ID NO: 222.

[2405] Embodiment 349. The method of embodiment 344, wherein the step of (b) conducting target-primed reverse transcription comprises generating a 3′ end primer binding sequence at the target locus that is capable of priming reverse transcription by annealing to a primer binding site on the guide RNA.

[2406] Embodiment 350. A method for replacing a trinucleotide repeat expansion mutation in a target DNA molecule with a healthy sequence comprising a healthy number of repeat trinucleotides, the method comprising: (a) contacting the DNA molecule at the target locus with a (i) fusion protein comprising a nucleic acid programmable DNA binding protein (napDNAbp) and a polymerase and (ii) a PEgRNA comprising DNA synthesis template comprising the replacement sequence and a primer binding site; (b) conducting prime editing to generate a single strand DNA comprising the replacement sequence; and (c) incorporating the single strand DNA into the DNA molecule at the target locus through a DNA repair and/or replication process.

[2407] Embodiment 351. The method of embodiment 350, wherein the fusion protein comprises the amino acid sequence of PE1, PE2, or PE3.

[2408] Embodiment 352. The method of embodiment 350, wherein the napDNAbp is a Cas9 nickase (nCas9).

[2409] Embodiment 353. The method of embodiment 350, wherein the napDNAbp comprises the amino acid sequence of SEQ ID NOs: 18-88, 126, 130, 137, 141, 147, 153, 157, 445, 460, 467, and 482-487.

[2410] Embodiment 354. The method of embodiment 350, wherein the guide RNA comprises SEQ ID NO: 222.

[2411] Embodiment 355. The method of embodiment 350, wherein the step of (b) conducting prime editing comprises generating a 3′ end primer binding sequence at the target locus that is capable of priming polymerase by annealing to the primer binding site on the guide RNA.

[2412] Embodiment 356. The method of embodiment 350, wherein the trinucleotide repeat expansion mutation is associated with Huntington's Disease, Fragile X syndrome, or Friedreich's ataxia.

[2413] Embodiment 357. The method of embodiment 350, wherein the trinucleotide repeat expansion mutation comprises a repeating unit of CAG triplets.

[2414] Embodiment 358. The method of embodiment 350, wherein the trinucleotide repeat expansion mutation comprises a repeating unit of GAA triplets.

[2415] Embodiment 359. A method of installing a functional moiety in a protein of interest encoded by a target nucleotide sequence by prime editing, the method comprising: (a) contacting the target nucleotide sequence with a (i) prime editor comprising a nucleic acid programmable DNA binding protein (napDNAbp) and a polymerase and (ii) a PEgRNA comprising DNA synthesis template encoding the functional moiety; (b) polymerizing a single strand DNA sequence encoding the functional moiety; and (c) incorporating the single strand DNA sequence in place of a corresponding endogenous strand at the target nucleotide sequence through a DNA repair and/or replication process, wherein the method produces a recombinant target nucleotide sequence that encodes a fusion protein comprising the protein of interest and the functional moiety.

[2416] Embodiment 360. The method of embodiment 359, wherein functional moiety is peptide tag.

[2417] Embodiment 361. The method of embodiment 360, wherein the peptide tag is an affinity tag, solubilization tag, chromatography tag, epitope or immunoepitope tag, or a fluorescence tag.

[2418] Embodiment 362. The method of embodiment 360, wherein the peptide tag is selected from the group consisting of: AviTag (SEQ ID NO: 245); C-tag (SEQ ID NO: 246); Calmodulin-tag (SEQ ID NO: 247); polyglutamate tag (SEQ ID NO: 248); E-tag (SEQ ID NO: 249); FLAG-tag (SEQ ID NO: 2); HA-tag (SEQ ID NO: 5); His-tag (SEQ ID NOs: 252-262); Myc-tag (SEQ ID NO: 6); NE-tag (SEQ ID NO: 264); Rho1D4-tag (SEQ ID NO: 265); S-tag (SEQ ID NO: 266); SBP-tag (SEQ ID NO: 267); Softag-1 (SEQ ID NO: 268); Softag-2 (SEQ ID NO: 269); Spot-tag (SEQ ID NO: 270); Strep-tag (SEQ ID NO: 271); TC tag (SEQ ID NO: 272); Ty tag (SEQ ID NO: 273); V5 tag (SEQ ID NO: 3); VSV-tag (SEQ ID NO: 275); and Xpress tag (SEQ ID NO: 276).

[2419] Embodiment 363. The method of embodiment 360, wherein the peptide tag is selected from the group consisting of: AU1 epitope (SEQ ID NO: 278); AU5 epitope (SEQ ID NO: 279); Bacteriophage T7 epitope (T7-tag) (SEQ ID NO: 280); Bluetongue virus tag (B-tag) (SEQ ID NO: 281); E2 epitope (SEQ ID NO: 282); Histidine affinity tag (HAT) (SEQ ID NO: 283); HSV epitope (SEQ ID NO: 284); Polyarginine (Arg-tag) (SEQ ID NO: 285); Polyaspartate (Asp-tag) (SEQ ID NO: 286); Polyphenylalanine (Phe-tag) (SEQ ID NO: 287); S1-tag (SEQ ID NO: 288); S-tag (SEQ ID NO: 266); and VSV-G (SEQ ID NO: 275).

[2420] Embodiment 364. The method of embodiment 359, wherein the functional moiety is an immunoepitope.

[2421] Embodiment 365. The method of embodiment 364, wherein the immunoepitope is selected from the group consisting of: tetanus toxoid (SEQ ID NO: 396); diphtheria toxin mutant CRM197 (SEQ ID NO: 630); mumps immunoepitope 1 (SEQ ID NO: 400); mumps immunoepitope 2 (SEQ ID NO: 402); mumps immunoeptitope 3 (SEQ ID NO: 404); rubella virus (SEQ ID NO: 406); hemagglutinin (SEQ ID NO: 408); neuraminidase (SEQ ID NO: 410); TAP1 (SEQ ID NO: 412); TAP2 (SEQ ID NO: 414); hemagglutinin epitopes toward class I HLA (SEQ ID NO: 416); neuraminidase epitopes toward class I HLA (SEQ ID NO: 418); hemagglutinin epitopes toward class II HLA (SEQ ID NO: 420); neuraminidase epitopes toward class II HLA (SEQ ID NO: 422); hemagglutinin epitope H5N1-bound class I and class II HLA (SEQ ID NO: 424); neuraminidase epitope H5N1-bound class I and class II HLA (SEQ ID NO: 426).

[2422] Embodiment 366. The method of embodiment 359, wherein the functional moiety alters the localization of the protein of interest.

[2423] Embodiment 367. The method of embodiment 359, wherein the functional moiety is a degradation tag such that the degradation rate of the protein of interest is altered.

[2424] Embodiment 368. The method of embodiment 367, wherein the degradation tag results in the elimination of the tagged protein.

[2425] Embodiment 369. The method of embodiment 359, wherein the functional moiety is a small molecule binding domain.

[2426] Embodiment 370. The method of embodiment 359, wherein the small molecule binding domain is FKBP12 of SEQ ID NO: 488.

[2427] Embodiment 371. The method of embodiment 359, wherein the small molecule binding domain is FKBP12-F36V of SEQ ID NO: 489.

[2428] Embodiment 372. The method of embodiment 359, wherein the small molecule binding domain is cyclophilin of SEQ ID NOs: 490 and 493-494.

[2429] Embodiment 373. The method of embodiment 359, wherein the small molecule binding domain is installed in two or more proteins of interest.

[2430] Embodiment 374. The method of embodiment 373, wherein the two or more proteins of interest may dimerize upon contacting with a small molecule.

[2431] Embodiment 375. The method of embodiment 369, wherein the small molecule is a dimer of a small molecule selected from the group consisting of those compounds disclosed in Embodiment 163 of Group 1.

[2432] Embodiment 376. A method of installing an immunoepitope in a protein of interest encoded by a target nucleotide sequence by prime editing, the method comprising: (a) contacting the target nucleotide sequence with a (i) prime editor comprising a nucleic acid programmable DNA binding protein (napDNAbp) and a polymerase and (ii) a PEgRNA comprising an edit template encoding the functional moiety; (b) polymerizing a single strand DNA sequence encoding the immunoepitope; and (c) incorporating the single strand DNA sequence in place of a corresponding endogenous strand at the target nucleotide sequence through a DNA repair and/or replication process, wherein the method produces a recombinant target nucleotide sequence that encodes a fusion protein comprising the protein of interest and the immunoepitope.

[2433] Embodiment 377. The method of embodiment 376, wherein the immunoepitope is selected from the group consisting of: tetanus toxoid (SEQ ID NO: 396); diphtheria toxin mutant CRM197 (SEQ ID NO: 630); mumps immunoepitope 1 (SEQ ID NO: 400); mumps immunoepitope 2 (SEQ ID NO: 402); mumps immunoeptitope 3 (SEQ ID NO: 404); rubella virus (SEQ ID NO: 406); hemagglutinin (SEQ ID NO: 408); neuraminidase (SEQ ID NO: 410); TAP1 (SEQ ID NO: 412); TAP2 (SEQ ID NO: 414); hemagglutinin epitopes toward class I HLA (SEQ ID NO: 416); neuraminidase epitopes toward class I HLA (SEQ ID NO: 418); hemagglutinin epitopes toward class II HLA (SEQ ID NO: 420); neuraminidase epitopes toward class II HLA (SEQ ID NO: 422); hemagglutinin epitope H5N1-bound class I and class II HLA (SEQ ID NO: 424); neuraminidase epitope H5N1-bound class I and class II HLA (SEQ ID NO: 426).

[2434] Embodiment 378. The method of embodiment 376, wherein the fusion protein comprises the amino acid sequence of PE1, PE2, or PE3.

[2435] Embodiment 379. The method of embodiment 376, wherein the napDNAbp is a Cas9 nickase (nCas9).

[2436] Embodiment 380. The method of embodiment 376, wherein the napDNAbp comprises the amino acid sequence of SEQ ID NOs: 18-88, 126, 130, 137, 141, 147, 153, 157, 445, 460, 467, and 482-487.

[2437] Embodiment 381. The method of embodiment 376, wherein the PEgRNA comprises SEQ ID NOs: 101-104, 181-183, 223-244, 277, 325-334, 336, 338, 340, 342, 344, 346, 348, 350, 352, 354, 356, 358, 360, 362, 364, 366, 368, 499-505, 735-761, 776-777.

[2438] Embodiment 382. A method of installing a small molecule dimerization domain in a protein of interest encoded by a target nucleotide sequence by prime editing, the method comprising: (a) contacting the target nucleotide sequence with a (i) prime editor comprising a nucleic acid programmable DNA binding protein (napDNAbp) and a polymerase and (ii) a PEgRNA comprising an edit template encoding the small molecule dimerization domain; (b) polymerizing a single strand DNA sequence encoding the immunoepitope; and (c) incorporating the single strand DNA sequence in place of a corresponding endogenous strand at the target nucleotide sequence through a DNA repair and/or replication process, wherein the method produces a recombinant target nucleotide sequence that encodes a fusion protein comprising the protein of interest and the small molecule dimerization domain.

[2439] Embodiment 383. The method of embodiment 382, further comprising conducting the method on a second protein of interest.

[2440] Embodiment 384. The method of embodiment 383, wherein the first protein of interest and the second protein of interest dimerize in the presence of a small molecule that binds to the dimerization domain on each of said proteins.

[2441] Embodiment 385. The method of embodiment 382, wherein the small molecule binding domain is FKBP12 of SEQ ID NO: 488.

[2442] Embodiment 386. The method of embodiment 382, wherein the small molecule binding domain is FKBP12-F36V of SEQ ID NO: 489.

[2443] Embodiment 387. The method of embodiment 382, wherein the small molecule binding domain is cyclophilin of SEQ ID NOs: 490 and 493-494.

[2444] Embodiment 388. The method of embodiment 382, wherein the small molecule is a dimer of a small molecule selected from the group consisting of those compounds disclosed in Embodiment 163 of Group 1.

[2445] Embodiment 389. The method of embodiment 382, wherein the fusion protein comprises the amino acid sequence of PE1, PE2, or PE3.

[2446] Embodiment 390. The method of embodiment 382, wherein the napDNAbp is a Cas9 nickase (nCas9).

[2447] Embodiment 391. The method of embodiment 382, wherein the napDNAbp comprises the amino acid sequence of SEQ ID NOs: 18-88, 126, 130, 137, 141, 147, 153, 157, 445, 460, 467, and 482-487.

[2448] Embodiment 392. The method of embodiment 382, wherein the PEgRNA comprises SEQ ID NOs: 101-104, 181-183, 223-244, 277, 325-334, 336, 338, 340, 342, 344, 346, 348, 350, 352, 354, 356, 358, 360, 362, 364, 366, 368, 499-505, 735-761, 776-777.

[2449] Embodiment 393. A method of installing a peptide tag or epitope onto a protein using prime editing, comprising: contacting a target nucleotide sequence encoding the protein with a prime editor construct configured to insert therein a second nucleotide sequence encoding the peptide tag to result in a recombinant nucleotide sequence, such that the peptide tag and the protein are expressed from the recombinant nucleotide sequence as a fusion protein.

[2450] Embodiment 394. The method of embodiment 383, wherein the peptide tag is used for purification and/or detection of the protein.

[2451] Embodiment 395. The method of embodiment 383, wherein the peptide tag is a poly-histidine (e.g., HHHHHH (SEQ ID NO: 252-262), FLAG (e.g., DYKDDDDK) (SEQ ID NO: 2), V5 (e.g., GKPIPNPLLGLDST) (SEQ ID NO: 3), GCN4, HA (e.g., YPYDVPDYA) (SEQ ID NO: 5), Myc (e.g. EQKLISEED) (SEQ ID NO: 6), or GST.

[2452] Embodiment 396. The method of embodiment 383, wherein the peptide tag has an amino acid sequence selected from the group consisting of SEQ ID NO: 1-6, 245-249, 252-262, 264-273, 275-276, 281, 278-288, and 622.

[2453] Embodiment 397. The method of embodiment 383, wherein the peptide tag is fused to the protein by a linker.

[2454] Embodiment 398. The method of embodiment 383, wherein the fusion protein has the following structure: [protein]-[peptide tag] or [peptide tag]-[protein], wherein “]-[” represents an optional linker.

[2455] Embodiment 399. The method of embodiment 383, wherein the linker has an amino acid sequence of SEQ ID NO: 127, 165-176, 446, 453, and 767-769.

[2456] Embodiment 400. The method of embodiment 383, wherein the prime editor construct comprises a PEgRNA comprising the nucleotide sequence of SEQ ID NOs: 101-104, 181-183, 223-244, 277, 325-334, 336, 338, 340, 342, 344, 346, 348, 350, 352, 354, 356, 358, 360, 362, 364, 366, 368, 499-505, 735-761, 776-777.

[2457] Embodiment 401. The method of embodiment 383, wherein the PEgRNA comprises a spacer, a gRNA core, and an extension arm, wherein the spacer is complementary to the target nucleotide sequence and the extension arm comprises a reverse transcriptase template that encodes the peptide tag.

[2458] Embodiment 402. The method of embodiment 383, wherein the PEgRNA comprises a spacer, a gRNA core, and an extension arm, wherein the spacer is complementary to the target nucleotide sequence and the extension arm comprises a reverse transcriptase template that encodes the peptide tag.

[2459] Embodiment 403. A method of preventing or halting the progression of a prion disease by installing on or more protective mutations into PRNP encoded by a target nucleotide sequence by prime editing, the method comprising: (a) contacting the target nucleotide sequence with a (i) prime editor comprising a nucleic acid programmable DNA binding protein (napDNAbp) and a polymerase and (ii) a PEgRNA comprising an edit template encoding the functional moiety; (b) polymerizing a single strand DNA sequence encoding the protective mutation; and (c) incorporating the single strand DNA sequence in place of a corresponding endogenous strand at the target nucleotide sequence through a DNA repair and/or replication process, wherein the method produces a recombinant target nucleotide sequence that encodes a PRNP comprising a protective mutation and which is resistant to misfolding.

[2460] Embodiment 404. The method of embodiment 403, wherein the prion disease is a human prion disease.

[2461] Embodiment 405. The method of embodiment 403, wherein the prion disease is an animal prion disease.

[2462] Embodiment 406. The method of embodiment 404, wherein the prion disease is Creutzfeldt-Jakob Disease (CJD), Variant Creutzfeldt-Jakob Disease (vCJD), Gerstmann-Straussler-Scheinker Syndrome, Fatal Familial Insomnia, or Kuru.

[2463] Embodiment 407. The method of embodiment 403, wherein the prion disease is Bovine Spongiform Encephalopathy (BSE or “mad cow disease”), Chronic Wasting Disease (CWD), Scrapie, Transmissible Mink Encephalopathy, Feline Spongiform Encephalopathy, and Ungulate Spongiform Encephalopathy.

[2464] Embodiment 408. The method of embodiment 403, wherein the wildtype PRNP amino acid sequence is SEQ ID NOs: 291-292.

[2465] Embodiment 409. The method of embodiment 403, wherein the method results in a modified PRNP amino acid sequence selected from the group consisting of SEQ ID NOs: 293-309, 311-323, wherein said modified PRNP protein is resistant to misfolding.

[2466] Embodiment 410. The method of embodiment 403, wherein the fusion protein comprises the amino acid sequence of PE1, PE2, or PE3.

[2467] Embodiment 411. The method of embodiment 403, wherein the napDNAbp is a Cas9 nickase (nCas9).

[2468] Embodiment 412. The method of embodiment 403, wherein the napDNAbp comprises the amino acid sequence of SEQ ID NOs: 18-88, 126, 130, 137, 141, 147, 153, 157, 445, 460, 467, and 482-487.

[2469] Embodiment 413. The method of embodiment 403, wherein the PEgRNA comprises SEQ ID NOs: 101-104, 181-183, 223-244, 277, 325-334, 336, 338, 340, 342, 344, 346, 348, 350, 352, 354, 356, 358, 360, 362, 364, 366, 368, 499-505, 735-761, 776-777.

[2470] Embodiment 414. A method of installing a ribonucleotide motif or tag in an RNA of interest encoded by a target nucleotide sequence by prime editing, the method comprising: (a) contacting the target nucleotide sequence with a (i) prime editor comprising a nucleic acid programmable DNA binding protein (napDNAbp) and a polymerase and (ii) a PEgRNA comprising an edit template encoding the ribonucleotide motif or tag; (b) polymerizing a single strand DNA sequence encoding the ribonucleotide motif or tag; and (c) incorporating the single strand DNA sequence in place of a corresponding endogenous strand at the target nucleotide sequence through a DNA repair and/or replication process, wherein the method produces a recombinant target nucleotide sequence that encodes a modified RNA of interest comprising the ribonucleotide motif or tag.

[2471] Embodiment 415. The method of embodiment 414, wherein ribonucleotide motif or tag is a detection moiety.

[2472] Embodiment 416. The method of embodiment 414, wherein the ribonucleotide motif or tag affects the expression level of the RNA of interest.

[2473] Embodiment 417. The method of embodiment 414, wherein the ribonucleotide motif or tag affects the transport or subcellular location of the RNA of interest.

[2474] Embodiment 418. The method of embodiment 414, wherein the ribonucleotide motif or tag is selected from the group consisting of SV40 type 1, SV40 type 2, SV40 type 3, hGH, BGH, rbGlob, TK, MALAT1 ENE-mascRNA, KSHV PAN ENE, Smbox/U1 snRNA box, U1 snRNA 3′ box, tRNA-lysine, broccoli aptamer, spinach aptamer, mango aptamer, HDV ribozyme, and m6A.

[2475] Embodiment 419. The method of embodiment 414, wherein the PEgRNA comprises SEQ ID NOs: 101-104, 181-183, 223-244, 277, 325-334, 336, 338, 340, 342, 344, 346, 348, 350, 352, 354, 356, 358, 360, 362, 364, 366, 368, 499-505, 735-761, 776-777.

[2476] Embodiment 420. The method of embodiment 414, wherein the fusion protein comprises the amino acid sequence of PE1, PE2, or PE3.

[2477] Embodiment 421. The method of embodiment 414, wherein the napDNAbp is a Cas9 nickase (nCas9).

[2478] Embodiment 422. The method of embodiment 414, wherein the napDNAbp comprises the amino acid sequence of SEQ ID NOs: 18-88, 126, 130, 137, 141, 147, 153, 157, 445, 460, 467, and 482-487.

[2479] Embodiment 423. A method of installing or deleting a functional moiety in a protein of interest encoded by a target nucleotide sequence by prime editing, the method comprising: (a) contacting the target nucleotide sequence with a (i) prime editor comprising a nucleic acid programmable DNA binding protein (napDNAbp) and a polymerase and (ii) a PEgRNA comprising an edit template encoding the functional moiety or deletion of same; (b) polymerizing a single strand DNA sequence encoding the functional moiety or deletion of same; and (c) incorporating the single strand DNA sequence in place of a corresponding endogenous strand at the target nucleotide sequence through a DNA repair and/or replication process, wherein the method produces a recombinant target nucleotide sequence that encodes a modified protein comprising the protein of interest and the functional moiety or the removal of same, wherein the functional moiety alters a modification state or localization state of the protein.

[2480] Embodiment 424. The method of embodiment 423, wherein functional moiety alters the phosphorylation, ubiquitylation, glycosylation, lipidation, hydroxylation, methylation, acetylation, crotonylation, SUMOylation state of the protein of interest.

[2481] Embodiment 425. A fusion protein comprising a nucleic acid programmable DNA binding protein (napDNAbp) domain and a domain comprising an RNA-dependent DNA polymerase activity.

[2482] Embodiment 426. The fusion protein of embodiment 425, wherein the fusion protein is capable of carrying out prime editing in the presence of an prime editing guide RNA (PEgRNA) to install a desired nucleotide change in a target sequence.

[2483] Embodiment 427. The fusion protein of embodiment 425, wherein the napDNAbp domain has a nickase activity.

[2484] Embodiment 428. The fusion protein of embodiment 425, wherein the napDNAbp domain is a Cas9 protein or variant thereof.

[2485] Embodiment 429. The fusion protein of embodiment 425, wherein the napDNAbp domain is a nuclease active Cas9, a nuclease inactive Cas9 (dCas9), or a Cas9 nickase (nCas9).

[2486] Embodiment 430. The fusion protein of embodiment 425, wherein the napDNAbp domain is Cas9 nickase (nCas9).

[2487] Embodiment 431. The fusion protein of embodiment 425, wherein the napDNAbp domain is selected from the group consisting of: Cas9, Cas12e, Cas12d, Cas12a, Cas12b1, Cas13a, Cas12c, and Argonaute and optionally has a nickase activity.

[2488] Embodiment 432. The fusion protein of embodiment 425, wherein the domain comprising an RNA-dependent DNA polymerase activity is a reverse transcriptase comprising any one of the amino acid sequences of SEQ ID NOs: 89-100, 105-122, 128-129, 132, 139, 143, 149, 154, 159, 235, 454, 471, 516, 662, 700, 701-716, 739-741, and 766.

[2489] Embodiment 433. The fusion protein of embodiment 425, wherein the domain comprising an RNA-dependent DNA polymerase activity is a reverse transcriptase comprising an amino acid sequence having at least 80%, 85%, 90%, 95%, 98%, or 99% sequence identity with the amino acid sequence of any one of SEQ ID NOs: 89-100, 105-122, 128-129, 132, 139, 143, 149, 154, 159, 235, 454, 471, 516, 662, 700, 701-716, 739-741, and 766, and optionally wherein the domain comprising an RNA-dependent DNA polymerase is error-prone.

[2490] Embodiment 434. The fusion protein of embodiment 425, wherein the domain comprising an RNA-dependent DNA polymerase activity is a naturally-occurring reverse transcriptase from a retrovirus or a retrotransposon.

[2491] Embodiment 435. The fusion protein of embodiment 425, wherein the fusion protein when complexed with a PEgRNA is capable of binding to a target DNA sequence.

[2492] Embodiment 436. The fusion protein of embodiment 435, wherein the target DNA sequence comprises a target strand and a complementary non-target strand.

[2493] Embodiment 437. The fusion protein of embodiment 435, wherein the binding of the fusion protein complexed to the PEgRNA forms an R-loop.

[2494] Embodiment 438. The fusion protein of embodiment 437, wherein the R-loop comprises (i) an RNA-DNA hybrid comprising the PEgRNA and the target strand, and (ii) the complementary non-target strand.

[2495] Embodiment 439. The fusion protein of embodiment 437, wherein the target or the complementary non-target strand is nicked to form a priming sequence having a free 3′ end.

[2496] Embodiment 440. The fusion protein of embodiment 439, wherein the nick site is upstream of the PAM sequence on the target strand.

[2497] Embodiment 441. The fusion protein of embodiment 439, wherein the nick site is upstream of the PAM sequence on the non-target strand.

[2498] Embodiment 442. The fusion protein of embodiment 439, wherein the nick site −1, -2, -3, -4, -5, -6, -7, -8, or -9 relative to the 5′ end of the PAM sequence.

[2499] Embodiment 443. The fusion protein of embodiment 426, wherein the PEgRNA comprises a guide RNA and at least one nucleic acid extension arm.

[2500] Embodiment 444. The fusion protein of embodiment 443, wherein the extension arm is at the 5′ or the 3′ end of the guide RNA, or at an intramolecular location in the guide RNA.

[2501] Embodiment 445. The fusion protein of embodiment 443, wherein the extension arm comprises (i) a DNA synthesis template sequence comprising a desired nucleotide change, and (ii) a primer binding site.

[2502] Embodiment 446. The fusion protein of embodiment 445, wherein the DNA synthesis template sequence encodes a single-strand DNA flap that is complementary to an endogenous DNA sequence adjacent to the nick site, wherein the single-strand DNA flap comprises the desired nucleotide change.

[2503] Embodiment 447. The fusion protein of embodiment 443, wherein the extension arm is at least 5 nucleotides, at least 6 nucleotides, at least 7 nucleotides, at least 8 nucleotides, at least 9 nucleotides, at least 10 nucleotides, at least 11 nucleotides, at least 12 nucleotides, at least 13 nucleotides, at least 14 nucleotides, at least 15 nucleotides, at least 16 nucleotides, at least 17 nucleotides, at least 18 nucleotides, at least 19 nucleotides, at least 20 nucleotides, at least 21 nucleotides, at least 22 nucleotides, at least 23 nucleotides, at least 24 nucleotides, at least 25 nucleotides, at least 26 nucleotides, at least 27 nucleotides, at least 28 nucleotides, at least 29 nucleotides, at least 30 nucleotides, at least 31 nucleotides, at least 32 nucleotides, at least 33 nucleotides, at least 34 nucleotides, at least 35 nucleotides, at least 36 nucleotides, at least 37 nucleotides, at least 38 nucleotides, at least 39 nucleotides, at least 40 nucleotides, at least 41 nucleotides, at least 42 nucleotides, at least 43 nucleotides, at least 44 nucleotides, at least 45 nucleotides, at least 46 nucleotides, at least 47 nucleotides, at least 48 nucleotides, at least 49 nucleotides, or at least 50 nucleotides.

[2504] Embodiment 448. The fusion protein of embodiment 443, wherein the single-strand DNA flap hybridizes to the endogenous DNA sequence adjacent to the nick site, thereby installing the desired nucleotide change in the target strand.

[2505] Embodiment 449. The fusion protein of embodiment 443, wherein the single-stranded DNA flap displaces the endogenous DNA sequence adjacent to the nick site and which has a free 5′ end.

[2506] Embodiment 450. The fusion protein of embodiment 446, wherein the endogenous DNA sequence having the 5′ end is excised by the cell.

[2507] Embodiment 451. The fusion protein of embodiment 446, wherein the endogenous DNA sequence having the 5′ end is excised by a flap endonuclease.

[2508] Embodiment 452. The fusion protein of embodiment 448, wherein cellular repair of the single-strand DNA flap incorporates the desired nucleotide change in the non-target strand, thereby forming a desired product.

[2509] Embodiment 453. The fusion protein of embodiment 449, wherein the desired nucleotide change is installed in an editing window that is between about −4 to +10 of the PAM sequence, or between about −10 to +20 of the PAM sequence, or between about −20 to +40 of the PAM sequence, or between about −30 to +100 of the PAM sequence.

[2510] Embodiment 454. The fusion protein of embodiment 449, wherein the desired nucleotide change is installed at least 1, 2, 3, 4, 5, 6, 7, 8, 9, 10, 11, 12, 13, 14, 15, 16, 17, 18, 19, 20, 21, 22, 23, 24, 25, 26, 27, 28, 29, 30, 31, 32, 33, 34, 35, 36, 37, 38, 39, 40, 41, 42, 43, 44, 45, 46, 47, 48, 49, 50, 51, 52, 53, 54, 55, 56, 57, 58, 59, 60, 61, 62, 63, 64, 65, 66, 67, 68, 69, 70, 71, 72, 73, 74, 75, 76, 77, 78, 79, 80, 81, 82, 83, 84, 85, 86, 87, 88, 89, 90, 91, 92, 93, 94, 95, 96, 97, 98, 99, or 100 nucleotides downstream of the nick site.

[2511] Embodiment 455. The fusion protein of embodiment 425, wherein the napDNAbp comprises an amino acid sequence of SEQ ID NO:18, or an amino acid sequence having at least 80%, 85%, 90%, 95%, 98%, or 99% sequence identity with the amino acid sequence to SEQ ID NO: 18.

[2512] Embodiment 456. The fusion protein of embodiment 425, wherein the napDNAbp comprises an amino acid sequence having at least 80%, 85%, 90%, 95%, 98%, or 99% sequence identity with the amino acid sequence of any one of SEQ ID NOs: 18-88, 126, 130, 137, 141, 147, 153, 157, 445, 460, 467, and 482-487.

[2513] Embodiment 457. The fusion protein of any one of the previous embodiments, wherein the fusion protein comprises the structure NH2-[napDNAbp]-[domain comprising an RNA-dependent DNA polymerase activity]-COOH; or NH2-[domain comprising an RNA-dependent DNA polymerase activity]-[napDNAbp]-COOH, wherein each instance of “]-[” indicates the presence of an optional linker sequence.

[2514] Embodiment 458. The fusion protein of embodiment 457, wherein the linker sequence comprises an amino acid sequence of SEQ ID NOs: 127, 165-176, 446, 453, and 767-769.

[2515] Embodiment 459. The fusion protein of embodiment 425, wherein the desired nucleotide change is a single nucleotide change, an insertion of one or more nucleotides, or a deletion of one or more nucleotides.

[2516] Embodiment 460. The fusion protein of embodiment 459, wherein the insert or deletion is at least 1, at least 2, at least 3, at least 4, at least 5, at least 6, at least 7, at least 8, at least 9, at least 10, at least 11, at least 12, at least 13, at least 14, at least 15, at least 16, at least 17, at least 18, at least 19, at least 20, at least 21, at least 22, at least 23, at least 24, at least 25, at least 26, at least 27, at least 28, at least 29, at least 30, at least 31, at least 32, at least 33, at least 34, at least 35, at least 36, at least 37, at least 38, at least 39, at least 40, at least 41, at least 42, at least 43, at least 44, at least 45, at least 46, at least 47, at least 48, at least 49, or at least 50.

[2517] Embodiment 461. A complex comprising a fusion protein of any of embodiments 425-460 and a PEgRNA, wherein the PEgRNA directs the fusion protein to a target DNA sequence for prime editing.

[2518] Embodiment 462. The complex of embodiment 461, wherein the PEgRNA comprises a guide RNA and a nucleic acid extension arm at the 3′ or 5′ end of the guide RNA or at an intramolecular position in the guide RNA.

[2519] Embodiment 463. The complex of embodiment 462, wherein the PEgRNA is capable of binding to a napDNAbp and directing the napDNAbp to the target DNA sequence.

[2520] Embodiment 464. The complex of embodiment 463, wherein the target DNA sequence comprises a target strand and a complementary non-target strand, wherein the guide RNA hybridizes to the target strand to form an RNA-DNA hybrid and an R-loop.

[2521] Embodiment 465. The complex of embodiment 464, wherein the at least one nucleic acid extension arm comprises (i) a DNA synthesis template, and (ii) a primer binding site.

[2522] Embodiment 466. The complex of embodiment 464, wherein the PEgRNA comprises the nucleotide sequence of SEQ ID NOs: 101-104, 181-183, 223-244, 277, 325-334, 336, 338, 340, 342, 344, 346, 348, 350, 352, 354, 356, 358, 360, 362, 364, 366, 368, 499-505, 735-761, 776-777, or a nucleotide sequence having at least 85%, or at least 90%, or at least 95%, or at least 98%, or at least 99% sequence identity with any one of SEQ ID NOs: 101-104, 181-183, 223-244, 277, 325-334, 336, 338, 340, 342, 344, 346, 348, 350, 352, 354, 356, 358, 360, 362, 364, 366, 368, 499-505, 735-761, 776-777.

[2523] Embodiment 467. The complex of embodiment 465, wherein the DNA synthesis template comprises a nucleotide sequence that is at least 80%, or 85%, or 90%, or 95%, or 99% identical to the endogenous DNA target.

[2524] Embodiment 468. The complex of embodiment 465, wherein the primer binding site hybridizes with a free 3′ end of the cut DNA.

[2525] Embodiment 469. The complex of embodiment 461, wherein the napDNAbp is a Cas9 nickase.

[2526] Embodiment 470. The complex of embodiment 461, wherein the napDNAbp comprises an amino acid sequence of SEQ ID NO: 18, or an amino acid sequence having at least 80%, 85%, 90%, 95%, 98%, or 99% sequence identity with SEQ ID NO: 18.

[2527] Embodiment 471. The complex of embodiment 461, wherein the napDNAbp comprises an amino acid sequence having at least 80%, 85%, 90%, 95%, 98%, or 99% sequence identity with the amino acid sequence of any one of SEQ ID NOs: 18-88, 126, 130, 137, 141, 147, 153, 157, 445, 460, 467, and 482-487.

[2528] Embodiment 472. The complex of embodiment 461, wherein the PEgRNA comprises a guide RNA and a nucleic acid extension arm at the 3′ or 5′ end of the guide RNA, or at an intramolecular position in the guide RNA.

[2529] Embodiment 473. The complex of embodiment 465, wherein the DNA synthesis template comprises a nucleotide sequence that is at least 80%, or 85%, or 90%, or 95%, or 99% identical to the endogenous DNA target.

[2530] Embodiment 474. The complex of embodiment 465, wherein the primer binding site hybridizes with a free 3′ end of the cut DNA.

[2531] Embodiment 475. The complex of embodiment 462, wherein the PEgRNA further comprises at least one additional structure selected from the group consisting of a linker, a stem loop, a hairpin, a toeloop, an aptamer, or an RNA-protein recruitment domain.

[2532] Embodiment 476. A polynucleotide encoding the fusion protein of any of embodiments 425-461.

[2533] Embodiment 477. A polynucleotide encoding the PEgRNA of any of the above embodiments.

[2534] Embodiment 478. A vector comprising the polynucleotide of embodiment 476, wherein expression of the fusion protein is under the control of a promoter.

[2535] Embodiment 479. A vector comprising the polynucleotide of embodiment 477, wherein expression of the PEgRNA is under the control of a promoter.

[2536] Embodiment 480. The vector of embodiment 479, wherein the promoter is a U6 promoter.

[2537] Embodiment 481. The vector of embodiment 479, wherein the promoter is a CMV promoter.

[2538] Embodiment 482. The vector of embodiment 480, wherein the PEgRNA is engineered to remove one or more repeating clusters of Ts in the extension arm to improve transcription efficiency by the U6 promoter.

[2539] Embodiment 483. The vector of embodiment 482, wherein the one or more repeating clusters of Ts that is removed comprises at least 3 Ts, at least 4 Ts, at least 5 Ts, at least 6 Ts, at least 7 Ts, at least 8 Ts, at least 9 Ts, at least 10 Ts, at least 11 Ts, at least 12 Ts, at least 13 Ts, at least 14 Ts, at least 15 Ts, at least 16 Ts, at least 17 Ts, at least 18 Ts, at least 19 Ts, or at least 20 Ts.

[2540] Embodiment 484. A cell comprising the fusion protein of any of embodiments 425-460 and an PEgRNA bound to the napDNAbp of the fusion protein.

[2541] Embodiment 485. A cell comprising a complex of any one of embodiments 461-475.

[2542] Embodiment 486. A pharmaceutical composition comprising: (i) a fusion protein of any of embodiments 425-460, the complex of embodiments 461-475, the polynucleotide of embodiments 476-477, or the vector of embodiments 478-483; and (ii) a pharmaceutically acceptable excipient.

[2543] Embodiment 487. A pharmaceutical composition comprising: (i) the complex of embodiments 461-475 (ii) a polymerase provided in trans; and (iii) a pharmaceutically acceptable excipient.

[2544] Embodiment 488. A kit for prime editing comprising: (i) a nucleic acid molecule encoding the fusion protein of any one of embodiments 425-460; and (ii) a nucleic acid molecule encoding a PEgRNA that is capable of directing the fusion protein to a target DNA site, wherein the nucleic acid molecule of (i) and (ii) may be contained within a single DNA construct or separate DNA constructs.

[2545] Embodiment 489. The kit of embodiment 488, wherein the nucleic acid molecule of (i) further comprising a promoter that drives expression of the fusion protein.

[2546] Embodiment 490. The kit of embodiment 488, wherein the nucleic acid molecule of (ii) further comprises a promoter that drives expression of the PEgRNA.

[2547] Embodiment 491. The kit of embodiment 490, wherein the promoter is a U6 promoter.

[2548] Embodiment 492. The kit of embodiment 490, wherein the promoter is a CMV promoter.

[2549] Embodiment 493. The fusion protein of embodiment 457, wherein the linker sequence comprises an amino acid sequence of SEQ ID NOs: 174 (1×SGGS), 446 (2× SGGS), 3889 (3×SGGS), 171 (1×XTEN), 3968 (1×EAAAK), 3969 (2×EAAAK), and 3970 (3×EAAAK).

### Group B. PE Guides and Methods of Design

[2550] Embodiment 1. A PEgRNA comprising a guide RNA and at least one nucleic acid extension arm comprising a DNA synthesis template.

[2551] Embodiment 2. The PEgRNA of embodiment 1, wherein the nucleic acid extension arm is position at the 3′ or 5′ end of the guide RNA, or at an intramolecular position in the guide RNA, and wherein the nucleic acid extension arm is DNA or RNA.

[2552] Embodiment 3. The PEgRNA of embodiment 1, wherein the PEgRNA is capable of binding to a napDNAbp and directing the napDNAbp to a target DNA sequence.

[2553] Embodiment 4. The PEgRNA of embodiment 3, wherein the target DNA sequence comprises a target strand and a complementary non-target strand.

[2554] Embodiment 5. The PEgRNA of embodiment 3, wherein the guide RNA hybridizes to the target strand to form an RNA-DNA hybrid and an R-loop.

[2555] Embodiment 6. The PEgRNA of embodiment 1, wherein the at least one nucleic acid extension arm further comprises a primer binding site.

[2556] Embodiment 7. The PEgRNA of embodiment 1, wherein the nucleic acid extension arm is at least 5 nucleotides, at least 6 nucleotides, at least 7 nucleotides, at least 8 nucleotides, at least 9 nucleotides, at least 10 nucleotides, at least 11 nucleotides, at least 12 nucleotides, at least 13 nucleotides, at least 14 nucleotides, at least 15 nucleotides, at least 16 nucleotides, at least 17 nucleotides, at least 18 nucleotides, at least 19 nucleotides, at least 20 nucleotides, at least 21 nucleotides, at least 22 nucleotides, at least 23 nucleotides, at least 24 nucleotides, at least 25 nucleotides, at least 26 nucleotides, at least 27 nucleotides, at least 28 nucleotides, at least 29 nucleotides, at least 30 nucleotides, at least 31 nucleotides, at least 32 nucleotides, at least 33 nucleotides, at least 34 nucleotides, at least 35 nucleotides, at least 36 nucleotides, at least 37 nucleotides, at least 38 nucleotides, at least 39 nucleotides, at least 40 nucleotides, at least 41 nucleotides, at least 42 nucleotides, at least 43 nucleotides, at least 44 nucleotides, at least 45 nucleotides, at least 46 nucleotides, at least 47 nucleotides, at least 48 nucleotides, at least 49 nucleotides, or at least 50 nucleotides.

[2557] Embodiment 8. The PEgRNA of embodiment 1, wherein the DNA synthesis template is at least 3 nucleotides, at least 4 nucleotides, at least 5 nucleotides, at least 6 nucleotides, at least 7 nucleotides, at least 8 nucleotides, at least 9 nucleotides, at least 10 nucleotides, at least 11 nucleotides, at least 12 nucleotides, at least 13 nucleotides, at least 14 nucleotides, or at least 15 nucleotides in length.

[2558] Embodiment 9. The PEgRNA of embodiment 6, wherein the primer binding site is at least 3 nucleotides, at least 4 nucleotides, at least 5 nucleotides, at least 6 nucleotides, at least 7 nucleotides, at least 8 nucleotides, at least 9 nucleotides, at least 10 nucleotides, at least 11 nucleotides, at least 12 nucleotides, at least 13 nucleotides, at least 14 nucleotides, or at least 15 nucleotides in length.

[2559] Embodiment 10. The PEgRNA of embodiment 1, further comprising at least one additional structure selected from the group consisting of a tRNA, linker, a stem loop, a hairpin, a toeloop, an aptamer, or an RNA-protein recruitment domain.

[2560] Embodiment 11. The PEgRNA of embodiment 1, wherein the DNA synthesis template encodes a single-strand DNA flap that is complementary to an endogenous DNA sequence adjacent to a nick site, wherein the single-strand DNA flap comprises a desired nucleotide change.

[2561] Embodiment 12. The PEgRNA of embodiment 11, wherein the single-stranded DNA flap displaces an endogenous single-strand DNA having a 5′ end in the target DNA sequence that has been nicked, and wherein the endogenous single-strand DNA is immediately adjacent downstream of the nick site.

[2562] Embodiment 13. The PEgRNA of embodiment 11, wherein the endogenous single-stranded DNA having the free 5′ end is excised by the cell.

[2563] Embodiment 14. The PEgRNA of embodiment 13, wherein cellular repair of the single-strand DNA flap results in installation of the desired nucleotide change, thereby forming a desired product.

[2564] Embodiment 15. The PEgRNA of embodiment 1, comprising the nucleotide sequence of SEQ ID NOs: 101-104, 181-183, 223-244, 277, 325-334, 336, 338, 340, 342, 344, 346, 348, 350, 352, 354, 356, 358, 360, 362, 364, 366, 368, 499-505, 735-761, 776-777, or a nucleotide sequence having at least 85%, or at least 90%, or at least 95%, or at least 98%, or at least 99% sequence identity with any one of SEQ ID NOs: 101-104, 181-183, 223-244, 277, 325-334, 336, 338, 340, 342, 344, 346, 348, 350, 352, 354, 356, 358, 360, 362, 364, 366, 368, 499-505, 735-761, 776-777.

[2565] Embodiment 16. The PEgRNA of embodiment 1, wherein the DNA synthesis template comprises a nucleotide sequence that is at least 80%, or 85%, or 90%, or 95%, or 99% identical to the endogenous DNA target.

[2566] Embodiment 17. The PEgRNA of embodiment 6, wherein the primer binding site hybridizes with a free 3′ end of the cut DNA.

[2567] Embodiment 18. The PEgRNA of embodiment 10, wherein the at least one additional structure is located at the 3′ or 5′ end of the PEgRNA.

[2568] Embodiment 19. The PEgRNA of embodiment 10, wherein the linker comprises a nucleotide sequence selected from the group consisting of SEQ ID NOs: 127, 165-176, 446, 453, and 767-769.

[2569] Embodiment 20. The PEgRNA of embodiment 10, wherein the stem loop comprises a nucleotide sequence selected from the stem loops described herein.

[2570] Embodiment 21. The PEgRNA of embodiment 10, wherein the hairpin comprises a nucleotide sequence selected from the hairpins described herein.

[2571] Embodiment 22. The PEgRNA of embodiment 10, wherein the toeloop comprises a nucleotide sequence selected from the toeloops described herein.

[2572] Embodiment 23. The PEgRNA of embodiment 10, wherein the aptamer comprises a nucleotide sequence selected from the aptamers described herein.

[2573] Embodiment 24. The PEgRNA of embodiment 10, wherein the RNA-protein recruitment domain comprises a nucleotide sequence selected from the RNA-protein recruitment domain described herein.

[2574] Embodiment 25. A method for designing a PEgRNA for use in prime editing to install a desired nucleotide change in a target nucleotide sequence, wherein said PEgRNA comprises a spacer, gRNA core, and an extension arm, and wherein said extension arm comprises a primer binding site and a DNA synthesis template, said method comprising:

[2575] (i) selecting a desired target edit site in a target nucleotide sequence;

[2576] (ii) obtaining a context nucleotide sequence upstream and downstream from the target edit site;

[2577] (iii) locating putative protospacer adjacent motif (PAM) sites in the context nucleotide sequence which are proximal to the desired target edit site;

[2578] (iv) identifying the corresponding nick sites for each putative PAM site;

[2579] (v) designing the spacer;

[2580] (vi) designing the gRNA core;

[2581] (vii) designing the extension arm; and

[2582] (viii) constructing the full PEgRNA by concatenating the spacer, gRNA core, and the extension arm.

[2583] Embodiment 26. The method of embodiment 25, wherein the step (i) of selecting the desired target edit site comprises selecting a disease-causing mutation.

[2584] Embodiment 27. The method of embodiment 26, wherein the disease-causing mutation is associated with a disease selected from the group consisting of: cancer, autoimmune disorders, neurological disorders, skin disorders, respiratory diseases, and cardiac diseases.

[2585] Embodiment 28. The method of embodiment 25, wherein the step (ii) of obtaining a context nucleotide sequence upstream and downstream from the target edit site comprises obtaining about 50-55 base pairs (bp), about 55-60 bp, about 60-65 bp, about 65-70 bp, about 70-75 bp, about 75-80 bp, about 80-85 bp, about 85-90 bp, about 90-95 bp, about 95-100 bp, about 100-105 bp, about 105-110 bp, about 110-125 bp, about 125-130 bp, about 130-135 bp, about 135-140 bp, about 140-145 bp, about 145-150 bp, about 150-155 bp, about 155-160 bp, about 160-165 bp, about 165-170 bp, about 170-175 bp, about 175-180 bp, about 180-185 bp, about 185-190 bp, about 190-195 bp, about 195-200 bp, about 200-205 bp, about 205-210 bp, about 210-215 bp, about 215-220 bp, about 220-225 bp, about 225-230 bp, about 230-235 bp, about 235-240 bp, about 240-245 bp, or about 245-250 bp of a region that comprises the desired target edit site.

[2586] Embodiment 29. The method of embodiment 28, wherein the desired target edit site is positioned approximately equidistant from each end of the context nucleotide sequence.

[2587] Embodiment 30. The method of embodiment 25, wherein in step (iii), the putative PAM sites are proximal to the desired target edit site.

[2588] Embodiment 31. The method of embodiment 25, wherein in step (iii), the putative PAM sites comprise those with associated nick sites located at a position less than 30 nucleotides from the target edit site, or less than 29, 28, 27, 26, 25, 24, 23, 22, 21, 20, 19, 18, 17, 16, 15, 14, 13, 12, 11, 10, 9, 8, 7, 6, 5, 4, 3, or 2 nucleotides from the target edit site.

[2589] Embodiment 32. The method of embodiment 25, wherein in step (iii), the putative PAM sites comprise those with associated nick sites located at a position more than 30 nucleotides from the target edit site, or more than 31, 32, 33, 34, 35, 36, 37, 38, 39, 40, 41, 42, 43, 44, 45, 46, 47, 48, 49, 50, 51, 52, 53, 54, 55, 56, 57, 58, 59, 60, 61, 62, 63, 64, 65, 66, 67, 68, 69, 70, 71, 72, 73, 74, 75, 76, 77, 78, 79, 80, 81, 82, 83, 84, 85, 86, 87, 88, 89, 90, 91, 92, 93, 94, 95, 96, 97, 98, 99, or 100 nucleotides from the target edit site.

[2590] Embodiment 33. The method of embodiment 25, wherein in step (iii), the putative PAM sites are associated with one or corresponding napDNAbp which bind to said PAM sites.

[2591] Embodiment 34. The method of embodiment 33, the putative PAM sites and their corresponding napDNAbps are selected from any of the following groupings: (a) SpCas9 of SEQ ID NO: 18-25 and 87-88 and NGG; (b) Sp VQR nCas9; and (c) NGAN.

[2592] Embodiment 35. The method of embodiment 25, wherein the step (v) of designing the spacer comprises determining the complement nucleotide sequence of the protospacer sequence associated with each putative PAM.

[2593] Embodiment 36. The method of embodiment 25, wherein the step (vi) of designing gRNA core comprises in the context of each putative PAM, selecting a gRNA core sequence that is capable of binding to a napDNAbp which is associated with each of said putative PAMs.

[2594] Embodiment 37. The method of embodiment 25, wherein the step (vii) of designing the extension arm comprises designing (a) a DNA synthesis template comprising the edit of interest, and (b) a primer binding site.

[2595] Embodiment 38. The method of embodiment 37, wherein designing the primer binding site comprises (a) identifying a DNA primer on the PAM-containing strand of the target nucleotide sequence, wherein the 3′ end of the DNA primer is the first nucleotide upstream of the nick site associated with the PAM site, and (b) designing the complement of the DNA primer, wherein said complement forms the primer binding site.

[2596] Embodiment 39. The method of embodiment 38, wherein the primer binding site is 8 to 15 nucleotides in length.

[2597] Embodiment 40. The method of embodiment 38, wherein the primer binding site is 12-13 nucleotides if the DNA primer contains about 40-60% GC content.

[2598] Embodiment 41. The method of embodiment 38, wherein the primer binding site is 14-15 nucleotides if the DNA primer contains less than about 40% GC content.

[2599] Embodiment 42. The method of embodiment 38, wherein the primer binding site is 8-11 nucleotides if the DNA primer contains greater than about 60% GC content.

[2600] Embodiment 43. A method of prime editing comprising contacting a target DNA sequence with a PEgRNA of any of embodiments 1-24 and a prime editor fusion protein comprising a napDNAbp and a domain having an RNA-dependent DNA polymerase activity.

[2601] Embodiment 44. The method of embodiment 43, wherein the napDNAbp has a nickase activity.

[2602] Embodiment 45. The method of embodiment 43, wherein the napDNAbp is a Cas9 protein or variant thereof.

[2603] Embodiment 46. The method of embodiment 43, wherein the napDNAbp is a nuclease active Cas9, a nuclease inactive Cas9 (dCas9), or a Cas9 nickase (nCas9).

[2604] Embodiment 47. The method of embodiment 43, wherein the napDNAbp is Cas9 nickase (nCas9).

[2605] Embodiment 48. The method of embodiment 43, wherein the napDNAbp is selected from the group consisting of: Cas9, Cas12e, Cas12d, Cas12a, Cas12b1, Cas13a, Cas12c, and Argonaute and optionally has a nickase activity.

[2606] Embodiment 49. The method of embodiment 43, wherein the domain comprising an RNA-dependent DNA polymerase activity is a reverse transcriptase comprising any one of the amino acid sequences of SEQ ID NOs: 89-100, 105-122, 128-129, 132, 139, 143, 149, 154, 159, 235, 454, 471, 516, 662, 700, 701-716, 739-741, and 766.

[2607] Embodiment 50. The method of embodiment 43, wherein the domain comprising an RNA-dependent DNA polymerase activity is a reverse transcriptase comprising an amino acid sequence having at least 80%, 85%, 90%, 95%, 98%, or 99% sequence identity with the amino acid sequence of any one of SEQ ID NOs: 89-100, 105-122, 128-129, 132, 139, 143, 149, 154, 159, 235, 454, 471, 516, 662, 700, 701-716, 739-741, and 766.

[2608] Embodiment 51. The method of embodiment 43, wherein the domain comprising an RNA-dependent DNA polymerase activity is a naturally-occurring reverse transcriptase from a retrovirus or a retrotransposon.

### Group C. PE Complexes

[2609] Embodiment 1. A complex for prime editing comprising:

[2610] (i) fusion protein comprising a nucleic acid programmable DNA binding protein (napDNAbp) and a domain comprising an RNA-dependent DNA polymerase activity; and

[2611] (ii) a prime editing guide RNA (PEgRNA).

[2612] Embodiment 2. The complex of embodiment 1, wherein the fusion protein is capable of carrying out prime editing in the presence of the prime editing guide RNA (PEgRNA) to install a desired nucleotide change in a target sequence.

[2613] Embodiment 3. The complex of embodiment 11, wherein the napDNAbp has a nickase activity.

[2614] Embodiment 4. The complex of embodiment 1, wherein the napDNAbp is a Cas9 protein or variant thereof.

[2615] Embodiment 5. The complex of embodiment 1, wherein the napDNAbp is a nuclease active Cas9, a nuclease inactive Cas9 (dCas9), or a Cas9 nickase (nCas9).

[2616] Embodiment 6. The complex of embodiment 1, wherein the napDNAbp is Cas9 nickase (nCas9).

[2617] Embodiment 7. The complex of embodiment 1, wherein the napDNAbp is selected from the group consisting of: Cas9, Cas12e, Cas12d, Cas12a, Cas12b1, Cas13a, Cas12c, and Argonaute and optionally has a nickase activity.

[2618] Embodiment 8. The complex of embodiment 1, wherein the domain comprising an RNA-dependent DNA polymerase activity is a reverse transcriptase comprising any one of the amino acid sequences of SEQ ID NOs: 89-100, 105-122, 128-129, 132, 139, 143, 149, 154, 159, 235, 454, 471, 516, 662, 700, 701-716, 739-741, and 766.

[2619] Embodiment 9. The complex of embodiment 1, wherein the domain comprising an RNA-dependent DNA polymerase activity is a reverse transcriptase comprising an amino acid sequence having at least 80%, 85%, 90%, 95%, 98%, or 99% sequence identity with the amino acid sequence of any one of SEQ ID NOs: 89-100, 105-122, 128-129, 132, 139, 143, 149, 154, 159, 235, 454, 471, 516, 662, 700, 701-716, 739-741, and 766.

[2620] Embodiment 10. The complex of embodiment 1, wherein the domain comprising an RNA-dependent DNA polymerase activity is a naturally-occurring reverse transcriptase from a retrovirus or a retrotransposon.

[2621] Embodiment 11. The complex of embodiment 1, wherein the fusion protein when complexed with a PEgRNA is capable of binding to a target DNA sequence.

[2622] Embodiment 12. The complex of embodiment 1, wherein the PEgRNA comprises a guide RNA and at least one nucleic acid extension arm comprising a DNA synthesis template.

[2623] Embodiment 13. The complex of embodiment 12, wherein the nucleic acid extension arm is position at the 3′ or 5′ end of the guide RNA, or at an intramolecular position in the guide RNA, and wherein the nucleic acid extension arm is DNA or RNA.

[2624] Embodiment 14. The complex of embodiment 12, wherein the PEgRNA is capable of binding to a napDNAbp and directing the napDNAbp to a target DNA sequence.

[2625] Embodiment 15. The complex of embodiment 14, wherein the target DNA sequence comprises a target strand and a complementary non-target strand.

[2626] Embodiment 16. The complex of embodiment 12, wherein the guide RNA hybridizes to the target strand to form an RNA-DNA hybrid and an R-loop.

[2627] Embodiment 17. The complex of embodiment 12, wherein the at least one nucleic acid extension arm further comprises a primer binding site.

[2628] Embodiment 18. The complex of embodiment 12, wherein the nucleic acid extension arm is at least 5 nucleotides, at least 6 nucleotides, at least 7 nucleotides, at least 8 nucleotides, at least 9 nucleotides, at least 10 nucleotides, at least 11 nucleotides, at least 12 nucleotides, at least 13 nucleotides, at least 14 nucleotides, at least 15 nucleotides, at least 16 nucleotides, at least 17 nucleotides, at least 18 nucleotides, at least 19 nucleotides, at least 20 nucleotides, at least 21 nucleotides, at least 22 nucleotides, at least 23 nucleotides, at least 24 nucleotides, at least 25 nucleotides, at least 26 nucleotides, at least 27 nucleotides, at least 28 nucleotides, at least 29 nucleotides, at least 30 nucleotides, at least 31 nucleotides, at least 32 nucleotides, at least 33 nucleotides, at least 34 nucleotides, at least 35 nucleotides, at least 36 nucleotides, at least 37 nucleotides, at least 38 nucleotides, at least 39 nucleotides, at least 40 nucleotides, at least 41 nucleotides, at least 42 nucleotides, at least 43 nucleotides, at least 44 nucleotides, at least 45 nucleotides, at least 46 nucleotides, at least 47 nucleotides, at least 48 nucleotides, at least 49 nucleotides, or at least 50 nucleotides.

[2629] Embodiment 19. The complex of embodiment 12, wherein the DNA synthesis template is at least 3 nucleotides, at least 4 nucleotides, at least 5 nucleotides, at least 6 nucleotides, at least 7 nucleotides, at least 8 nucleotides, at least 9 nucleotides, at least 10 nucleotides, at least 11 nucleotides, at least 12 nucleotides, at least 13 nucleotides, at least 14 nucleotides, or at least 15 nucleotides in length.

[2630] Embodiment 20. The complex of embodiment 17, wherein the primer binding site is at least 3 nucleotides, at least 4 nucleotides, at least 5 nucleotides, at least 6 nucleotides, at least 7 nucleotides, at least 8 nucleotides, at least 9 nucleotides, at least 10 nucleotides, at least 11 nucleotides, at least 12 nucleotides, at least 13 nucleotides, at least 14 nucleotides, or at least 15 nucleotides in length.

[2631] Embodiment 21. The complex of embodiment 12, wherein the PEgRNA further comprises at least one additional structure selected from the group consisting of a linker, a stem loop, a hairpin, a toeloop, an aptamer, or an RNA-protein recruitment domain.

[2632] Embodiment 22. The complex of embodiment 12, wherein the DNA synthesis template encodes a single-strand DNA flap that is complementary to an endogenous DNA sequence adjacent to a nick site, wherein the single-strand DNA flap comprises a desired nucleotide change.

[2633] Embodiment 23. The complex of embodiment 22, wherein the single-stranded DNA flap displaces an endogenous single-strand DNA having a 5′ end in the target DNA sequence that has been nicked, and wherein the endogenous single-strand DNA is immediately adjacent downstream of the nick site.

[2634] Embodiment 24. The complex of embodiment 23, wherein the endogenous single-stranded DNA having the free 5′ end is excised by the cell.

[2635] Embodiment 25. The complex of embodiment 23, wherein cellular repair of the single-strand DNA flap results in installation of the desired nucleotide change, thereby forming a desired product.

[2636] Embodiment 26. The complex of embodiment 12, wherein the PEgRNA comprises the nucleotide sequence of SEQ ID NOs: 101-104, 181-183, 223-244, 277, 325-334, 336, 338, 340, 342, 344, 346, 348, 350, 352, 354, 356, 358, 360, 362, 364, 366, 368, 499-505, 735-761, 776-777, or a nucleotide sequence having at least 85%, or at least 90%, or at least 95%, or at least 98%, or at least 99% sequence identity with any one of SEQ ID NOs: 101-104, 181-183, 223-244, 277, 325-334, 336, 338, 340, 342, 344, 346, 348, 350, 352, 354, 356, 358, 360, 362, 364, 366, 368, 499-505, 735-761, 776-777.

[2637] Embodiment 27. The complex of embodiment 12, wherein the DNA synthesis template comprises a nucleotide sequence that is at least 80%, or 85%, or 90%, or 95%, or 99% identical to the endogenous DNA target.

[2638] Embodiment 28. The complex of embodiment 17, wherein the primer binding site hybridizes with a free 3′ end of the cut DNA.

[2639] Embodiment 29. The complex of embodiment 21, wherein the at least one additional structure is located at the 3′ or 5′ end of the PEgRNA.

[2640] Embodiment 30. The complex of embodiment 29, wherein the linker comprises a nucleotide sequence selected from the group consisting of SEQ ID NOs: 127, 165-176, 446, 453, and 767-769.

[2641] Embodiment 31. The complex of embodiment 29, wherein the stem loop comprises a nucleotide sequence selected from the stem loops described herein.

[2642] Embodiment 32. The complex of embodiment 29, wherein the hairpin comprises a nucleotide sequence selected from the hairpins described herein.

[2643] Embodiment 33. The complex of embodiment 29, wherein the toeloop comprises a nucleotide sequence selected from the toeloops described herein.

[2644] Embodiment 34. The complex of embodiment 29, wherein the aptamer comprises a nucleotide sequence selected from the aptamers described herein.

[2645] Embodiment 35. The complex of embodiment 29, wherein the RNA-protein recruitment domain comprises a nucleotide sequence selected from the RNA-protein recruitment domains described herein.

[2646] Embodiment 36. The complex of embodiment 1, wherein the target DNA sequence comprises a target strand and a complementary non-target strand.

[2647] Embodiment 37. The complex of embodiment 36, wherein the R-loop comprises (i) an RNA-DNA hybrid comprising the PEgRNA and the target strand, and (ii) the complementary non-target strand.

[2648] Embodiment 38. The complex of embodiment 37, wherein the target or the complementary non-target strand is nicked to form a priming sequence having a free 3′ end.

[2649] Embodiment 39. The complex of embodiment 38, wherein the nick site is upstream of the PAM sequence on the target strand.

[2650] Embodiment 40. The complex of embodiment 38, wherein the nick site is upstream of the PAM sequence on the non-target strand.

[2651] Embodiment 41. The complex of embodiment 38, wherein the nick site-1, -2, -3, -4, -5, -6, -7, -8, or -9 relative to the 5′ end of the PAM sequence.

[2652] Embodiment 42. The complex of embodiment 22, wherein the single-strand DNA flap hybridizes to the endogenous DNA sequence adjacent to the nick site, thereby installing the desired nucleotide change in the target strand.

[2653] Embodiment 43. The complex of embodiment 22, wherein the single-stranded DNA flap displaces the endogenous DNA sequence adjacent to the nick site and which has a free 5′ end.

[2654] Embodiment 44. The complex of embodiment 22, wherein the endogenous DNA sequence having the 5′ end is excised by the cell.

[2655] Embodiment 45. The complex of embodiment 44, wherein the endogenous DNA sequence having the 5′ end is excised by a flap endonuclease.

[2656] Embodiment 46. The complex of embodiment 43, wherein cellular repair of the single-strand DNA flap incorporates the desired nucleotide change in the non-target strand, thereby forming a desired product.

[2657] Embodiment 47. The complex of embodiment 46, wherein the desired nucleotide change is installed in an editing window that is between about −4 to +10 of the PAM sequence, or between about −10 to +20 of the PAM sequence, or between about −20 to +40 of the PAM sequence, or between about −30 to +100 of the PAM sequence.

[2658] Embodiment 48. The complex of embodiment 47, wherein the desired nucleotide change is installed at least 1, 2, 3, 4, 5, 6, 7, 8, 9, 10, 11, 12, 13, 14, 15, 16, 17, 18, 19, 20, 21, 22, 23, 24, 25, 26, 27, 28, 29, 30, 31, 32, 33, 34, 35, 36, 37, 38, 39, 40, 41, 42, 43, 44, 45, 46, 47, 48, 49, 50, 51, 52, 53, 54, 55, 56, 57, 58, 59, 60, 61, 62, 63, 64, 65, 66, 67, 68, 69, 70, 71, 72, 73, 74, 75, 76, 77, 78, 79, 80, 81, 82, 83, 84, 85, 86, 87, 88, 89, 90, 91, 92, 93, 94, 95, 96, 97, 98, 99, or 100 nucleotides downstream of the nick site.

[2659] Embodiment 49. The complex of any one of the previous embodiments, wherein the fusion protein comprises the structure NH2-[napDNAbp]-[domain comprising an RNA-dependent DNA polymerase activity]-COOH; or NH2-[domain comprising an RNA-dependent DNA polymerase activity]—[napDNAbp]-COOH, wherein each instance of “]-[” indicates the presence of an optional linker sequence.

[2660] Embodiment 50. The complex of embodiment 49, wherein the linker sequence comprises an amino acid sequence of SEQ ID NOs: 127, 165-176, 446, 453, and 767-769.

[2661] Embodiment 51. The complex of embodiment 1, wherein the fusion protein further comprises a linker that joins the napDNAbp and the domain comprising an RNA-dependent DNA polymerase activity.

[2662] Embodiment 52. complex of embodiment 51, wherein the linker sequence comprises an amino acid sequence of SEQ ID NOs. 174 (1×SGGS), 446 (2×SGGS), 3889 (3×SGGS), 171 (1×XTEN), 3968 (1×EAAAK), 3969 (2×EAAAK), and 3970 (3× EAAAK).

### Group D. PE Method for Correcting Mutations

[2663] Embodiment 1. A method for installing a desired nucleotide change in a double-stranded DNA sequence, the method comprising: contacting the double-stranded DNA sequence with a complex comprising a fusion protein and a PEgRNA, wherein the fusion protein comprises a napDNAbp and a polymerase, and wherein the PEgRNA comprises a DNA synthesis template comprising the desired nucleotide change and a primer binding site;

[2664] thereby nicking the double-stranded DNA sequence, thereby generating a free single-strand DNA having a 3′ end;

[2665] thereby hybridizing the 3′ end of the free single-strand DNA to the primer binding site, thereby priming the polymerase;

[2666] thereby polymerizing a strand of DNA from the 3′ end hybridized to the primer binding site, thereby generating a single-strand DNA flap comprising the desired nucleotide change and which is complementary to the DNA synthesis template;

[2667] thereby replacing an endogenous DNA strand adjacent the cut site with the single-strand DNA flap, thereby installing the desired nucleotide change in the double-stranded DNA sequence.

[2668] Embodiment 2. The method of embodiment 1, wherein replacing an endogenous DNA strand comprises: (i) hybridizing the single-strand DNA flap to the endogenous DNA strand adjacent the cut site to create a sequence mismatch; (ii) excising the endogenous DNA strand; and (iii) repairing the mismatch to form the desired product comprising the desired nucleotide change in both strands of DNA.

[2669] Embodiment 3. The method of embodiment 1, wherein the desired nucleotide change is a single nucleotide substitution, a deletion, or an insertion.

[2670] Embodiment 4. The method of embodiment 3, wherein the single nucleotide substitution is a transition or a transversion.

[2671] Embodiment 5. The method of embodiment 1, wherein the desired nucleotide change is (1) a G to T substitution, (2) a G to A substitution, (3) a G to C substitution, (4) a T to G substitution, (5) a T to A substitution, (6) a T to C substitution, (7) a C to G substitution, (8) a C to T substitution, (9) a C to A substitution, (10) an A to T substitution, (11) an A to G substitution, or (12) an A to C substitution.

[2672] Embodiment 6. The method of embodiment 1, wherein the desired nucleotide change converts (1) a G:C basepair to a T:A basepair, (2) a G:C basepair to an A:T basepair, (3) a G:C basepair to C:G basepair, (4) a T:A basepair to a G:C basepair, (5) a T:A basepair to an A:T basepair, (6) a T:A basepair to a C:G basepair, (7) a C:G basepair to a G:C basepair, (8) a C:G basepair to a T:A basepair, a C:G basepair to an A:T basepair, (10) an A:T basepair to a T:A basepair, (11) an A:T basepair to a G:C basepair, or (12) an A:T basepair to a C:G basepair.

[2673] Embodiment 7. The method of embodiment 1, wherein the desired nucleotide change is an insertion or deletion of 1, 2, 3, 4, 5, 6, 7, 8, 9, 10, 11, 12, 13, 14, 15, 16, 17, 18, 19, 20, 21, 22, 23, 24, or 25 nucleotides.

[2674] Embodiment 8. The method of embodiment 1, wherein the desired nucleotide change corrects a disease-associated gene.

[2675] Embodiment 9. The method of embodiment 8, wherein the disease-associated gene is associated with a monogentic disorder selected from the group consisting of: Adenosine Deaminase (ADA) Deficiency; Alpha-1 Antitrypsin Deficiency; Cystic Fibrosis; Duchenne Muscular Dystrophy; Galactosemia; Hemochromatosis; Huntington's Disease; Maple Syrup Urine Disease; Marfan Syndrome; Neurofibromatosis Type 1; Pachyonychia Congenita; Phenylkeotnuria; Severe Combined Immunodeficiency; Sickle Cell Disease; Smith-Lemli-Opitz Syndrome; a trinucleotide repeat disorder; a prion disease; and Tay-Sachs Disease.

[2676] Embodiment 10. The method of embodiment 8, wherein the disease-associated gene is associated with a polygenic disorder selected from the group consisting of: heart disease; high blood pressure; Alzheimer's disease; arthritis; diabetes; cancer; and obesity.

[2677] Embodiment 11. The method of embodiment 1, wherein the napDNAbp is a nuclease dead Cas9 (dCas9), a Cas9 nickase (nCas9), or a nuclease active Cas9.

[2678] Embodiment 12. The method of embodiment 1, wherein the napDNAbp comprises an amino acid sequence of SEQ ID NO: 18.

[2679] Embodiment 13. The method of embodiment 1, wherein the napDNAbp comprises an amino acid sequence having at least 80%, 85%, 90%, 95%, 98%, or 99% sequence identity with the amino acid sequence of any one of SEQ ID NOs: 18-88, 126, 130, 137, 141, 147, 153, 157, 445, 460, 467, and 482-487.

[2680] Embodiment 14. The method of embodiment 1, wherein the polymerase is a reverse transcriptase comprising any one of the amino acid sequences of SEQ ID NOs: 89-100, 105-122, 128-129, 132, 139, 143, 149, 154, 159, 235, 454, 471, 516, 662, 700, 701-716, 739-741, and 766.

[2681] Embodiment 15. The method of embodiment 1, wherein the polymerase is a reverse transcriptase comprising an amino acid sequence having at least 80%, 85%, 90%, 95%, 98%, or 99% sequence identity with the amino acid sequence of any one of SEQ ID NOs: 89-100, 105-122, 128-129, 132, 139, 143, 149, 154, 159, 235, 454, 471, 516, 662, 700, 701-716, 739-741, and 766.

[2682] Embodiment 16. The method of embodiment 1, wherein the PEgRNA comprises a nucleic acid extension arm at the 3′ or 5′ ends or at an intramolecular location in the guide RNA, wherein the extension arm comprises the DNA synthesis template sequence and the primer binding site.

[2683] Embodiment 17. The method of embodiment 16, wherein the extension arm is at least 5 nucleotides, at least 6 nucleotides, at least 7 nucleotides, at least 8 nucleotides, at least 9 nucleotides, at least 10 nucleotides, at least 11 nucleotides, at least 12 nucleotides, at least 13 nucleotides, at least 14 nucleotides, at least 15 nucleotides, at least 16 nucleotides, at least 17 nucleotides, at least 18 nucleotides, at least 19 nucleotides, at least 20 nucleotides, at least 21 nucleotides, at least 22 nucleotides, at least 23 nucleotides, at least 24 nucleotides, or at least 25 nucleotides in length.

[2684] Embodiment 18. The method of embodiment 1, wherein the PEgRNA has a nucleotide sequence selected from the group consisting of SEQ ID NOs: 101-104, 181-183, 223-244, 277, 325-334, 336, 338, 340, 342, 344, 346, 348, 350, 352, 354, 356, 358, 360, 362, 364, 366, 368, 499-505, 735-761, 776-777.

[2685] Embodiment 19. A method for introducing one or more changes in the nucleotide sequence of a DNA molecule at a target locus, comprising: contacting the DNA molecule with a nucleic acid programmable DNA binding protein (napDNAbp) and a PEgRNA which targets the napDNAbp to the target locus, wherein the PEgRNA comprises a reverse transcriptase (RT) template sequence comprising at least one desired nucleotide change and a primer binding site;

[2686] thereby forming an exposed 3′ end in a DNA strand at the target locus;

[2687] thereby hybridizing the exposed 3′ end to the primer binding site to prime reverse transcription;

[2688] thereby synthesizing a single strand DNA flap comprising the at least one desired nucleotide change based on the RT template sequence by reverse transcriptase;

[2689] thereby incorporating the at least one desired nucleotide change into the corresponding endogenous DNA, thereby introducing one or more changes in the nucleotide sequence of the DNA molecule at the target locus.

[2690] Embodiment 20. The method of embodiment 19, wherein the one or more changes in the nucleotide sequence comprises a transition.

[2691] Embodiment 21. The method of embodiment 19, wherein the transition is selected from the group consisting of: (a) T to C; (b) A to G; (c) C to T; and (d) G to A.

[2692] Embodiment 22. The method of embodiment 19, wherein the one or more changes in the nucleotide sequence comprises a transversion.

[2693] Embodiment 23. The method of embodiment 22, wherein the transversion is selected from the group consisting of: (a) T to A; (b) T to G; (c) C to G; (d) C to A; (e) A to T; (f) A to C; (g) G to C; and (h) G to T.

[2694] Embodiment 24. The method of embodiment 19, wherein the one or more changes in the nucleotide sequence comprises changing (1) a G:C basepair to a T:A basepair, (2) a G:C basepair to an A:T basepair, (3) a G:C basepair to C:G basepair, (4) a T:A basepair to a G:C basepair, (5) a T:A basepair to an A:T basepair, (6) a T:A basepair to a C:G basepair, (7) a C:G basepair to a G:C basepair, (8) a C:G basepair to a T:A basepair, (9) a C:G basepair to an A:T basepair, (9) an A:T basepair to a T:A basepair, (11) an A:T basepair to a G:C basepair, or (12) an A:T basepair to a C:G basepair.

[2695] Embodiment 25. The method of embodiment 19, wherein the one or more changes in the nucleotide sequence comprises an insertion or deletion of 1, 2, 3, 4, 5, 6, 7, 8, 9, 10, 11, 12, 13, 14, 15, 16, 17, 18, 19, 20, 21, 22, 23, 24, or 25 nucleotides.

[2696] Embodiment 26. The method of embodiment 19, wherein the one or more changes in the nucleotide sequence comprises a correction to a disease-associated gene.

[2697] Embodiment 27. The method of embodiment 26, wherein the disease-associated gene is associated with a monogentic disorder selected from the group consisting of: Adenosine Deaminase (ADA) Deficiency; Alpha-1 Antitrypsin Deficiency; Cystic Fibrosis; Duchenne Muscular Dystrophy; Galactosemia; Hemochromatosis; Huntington's Disease; Maple Syrup Urine Disease; Marfan Syndrome; Neurofibromatosis Type 1; Pachyonychia Congenita; Phenylkeotnuria; Severe Combined Immunodeficiency; Sickle Cell Disease; Smith-Lemli-Opitz Syndrome; a trinucleotide repeat disorder; a prion disease; and Tay-Sachs Disease.

[2698] Embodiment 28. The method of embodiment 26, wherein the disease-associated gene is associated with a polygenic disorder selected from the group consisting of: heart disease; high blood pressure; Alzheimer's disease; arthritis; diabetes; cancer; and obesity.

[2699] Embodiment 29. The method of embodiment 19, wherein the napDNAbp is a nuclease active Cas9 or variant thereof.

[2700] Embodiment 30. The method of embodiment 19, wherein the napDNAbp is a nuclease inactive Cas9 (dCas9) or Cas9 nickase (nCas9), or a variant thereof.

[2701] Embodiment 31. The method of embodiment 19, wherein the napDNAbp comprises an amino acid sequence of SEQ ID NO: 18.

[2702] Embodiment 32. The method of embodiment 19, wherein the napDNAbp comprises an amino acid sequence having at least 80%, 85%, 90%, 95%, 98%, or 99% sequence identity with the amino acid sequence of any one of SEQ ID NOs: 18-88, 126, 130, 137, 141, 147, 153, 157, 445, 460, 467, and 482-487.

[2703] Embodiment 33. The method of embodiment 19, wherein the reverse transcriptase is introduced in trans.

[2704] Embodiment 34. The method of embodiment 19, wherein the napDNAbp comprises a fusion to a reverse transcriptase.

[2705] Embodiment 35. The method of embodiment 19, wherein the reverse transcriptase comprises any one of the amino acid sequences of SEQ ID NOs: 89-100, 105-122, 128-129, 132, 139, 143, 149, 154, 159, 235, 454, 471, 516, 662, 700, 701-716, 739-741, and 766.

[2706] Embodiment 36. The method of embodiment 19, wherein the reverse transcriptase comprises an amino acid sequence having at least 80%, 85%, 90%, 95%, 98%, or 99% sequence identity with the amino acid sequence of any one of SEQ ID NOs: 89-100, 105-122, 128-129, 132, 139, 143, 149, 154, 159, 235, 454, 471, 516, 662, 700, 701-716, 739-741, and 766.

[2707] Embodiment 37. The method of embodiment 19, wherein the step of forming an exposed 3′ end in the DNA strand at the target locus comprises nicking the DNA strand with a nuclease.

[2708] Embodiment 38. The method of embodiment 37, wherein the nuclease is the napDNAbp, is provided as a fusion domain of napDNAbp, or is provided in trans.

[2709] Embodiment 39. The method of embodiment 19, wherein the step of forming an exposed 3′ end in the DNA strand at the target locus comprises contacting the DNA strand with a chemical agent.

[2710] Embodiment 40. The method of embodiment 19, wherein the step of forming an exposed 3′ end in the DNA strand at the target locus comprises introducing a replication error.

[2711] Embodiment 41. The method of embodiment 19, wherein the step of contacting the DNA molecule with the napDNAbp and the guide RNA forms an R-loop.

[2712] Embodiment 42. The method of embodiment 41, wherein the DNA strand in which the exposed 3′ end is formed is in the R-loop.

[2713] Embodiment 43. The method of embodiment 19, wherein the PEgRNA comprises an extension arm that comprises the reverse transcriptase (RT) template sequence and the primer binding site.

[2714] Embodiment 44. The method of embodiment 43, wherein the extension arm is at the 3′ end of the guide RNA, the 5′ end of the guide RNA, or at an intramolecular position in the guide RNA.

[2715] Embodiment 45. The method of embodiment 19, wherein the PEgRNA further comprises at least one additional structure selected from the group consisting of a linker, a stem loop, a hairpin, a toeloop, an aptamer, or an RNA-protein recruitment domain.

[2716] Embodiment 46. The method of embodiment 19, wherein the PEgRNA further comprises a homology arm.

[2717] Embodiment 47. The method of embodiment 19, wherein the RT template sequence is homologous to the corresponding endogenous DNA.

[2718] Embodiment 48. A method for introducing one or more changes in the nucleotide sequence of a DNA molecule at a target locus by target-primed reverse transcription, the method comprising: (a) contacting the DNA molecule at the target locus with a (i) fusion protein comprising a nucleic acid programmable DNA binding protein (napDNAbp) and a reverse transcriptase and (ii) a guide RNA comprising an RT template comprising a desired nucleotide change;

[2719] thereby conducting target-primed reverse transcription of the RT template to generate a single strand DNA comprising the desired nucleotide change;

[2720] thereby incorporating the desired nucleotide change into the DNA molecule at the target locus through a DNA repair and/or replication process.

[2721] Embodiment 49. The method of embodiment 48, wherein the RT template is located at the 3′ end of the guide RNA, the 5′ end of the guide RNA, or at an intramolecular location in the guide RNA.

[2722] Embodiment 50. The method of embodiment 48, wherein the desired nucleotide change comprises a transition, a transversion, an insertion, or a deletion, or any combination thereof.

[2723] Embodiment 51. The method of embodiment 48, wherein the desired nucleotide change comprises a transition selected from the group consisting of: (a) T to C; (b) A to G; (c) C to T; and (d) G to A.

[2724] Embodiment 52. The method of embodiment 48, wherein the desired nucleotide change comprises a transversion selected from the group consisting of: (a) T to A; (b) T to G; (c) C to G; (d) C to A; (e) A to T; (f) A to C; (g) G to C; and (h) G to T.

[2725] Embodiment 53. The method of embodiment 48, wherein the desired nucleotide change comprises changing (1) a G:C basepair to a T:A basepair, (2) a G:C basepair to an A:T basepair, (3) a G:C basepair to C:G basepair, (4) a T:A basepair to a G:C basepair, (5) a T:A basepair to an A:T basepair, (6) a T:A basepair to a C:G basepair, (7) a C:G basepair to a G:C basepair, (8) a C:G basepair to a T:A basepair, (9) a C:G basepair to an A:T basepair, (10) an A:T basepair to a T:A basepair, (11) an A:T basepair to a G:C basepair, or (12) an A:T basepair to a C:G basepair.

[2726] Embodiment 54. A method for replacing a trinucleotide repeat expansion mutation in a target DNA molecule with a healthy sequence comprising a healthy number of repeat trinucleotides, the method comprising: (a) contacting the DNA molecule at the target locus with a (i) fusion protein comprising a nucleic acid programmable DNA binding protein (napDNAbp) and a polymerase and (ii) a PEgRNA comprising DNA synthesis template comprising the replacement sequence and a primer binding site; (b) conducting prime editing to generate a single strand DNA comprising the replacement sequence; and (c) incorporating the single strand DNA into the DNA molecule at the target locus through a DNA repair and/or replication process.

[2727] Embodiment 55. The method of embodiment 54, wherein the fusion protein comprises the amino acid sequence of PE1, PE2, or PE3.

[2728] Embodiment 56. The method of embodiment 54, wherein the napDNAbp is a Cas9 nickase (nCas9).

[2729] Embodiment 57. The method of embodiment 54, wherein the napDNAbp comprises the amino acid sequence of SEQ ID NOs: 18-88, 126, 130, 137, 141, 147, 153, 157, 445, 460, 467, and 482-487.

[2730] Embodiment 58. The method of embodiment 54, wherein the guide RNA comprises SEQ ID NO: 222.

[2731] Embodiment 59. The method of embodiment 54, wherein the step of (b) conducting prime editing comprises generating a 3′ end primer binding sequence at the target locus that is capable of priming polymerase by annealing to the primer binding site on the guide RNA.

[2732] Embodiment 60. The method of embodiment 54, wherein the trinucleotide repeat expansion mutation is associated with Huntington's Disease, Fragile X syndrome, or Friedreich's ataxia.

[2733] Embodiment 61. The method of embodiment 54, wherein the trinucleotide repeat expansion mutation comprises a repeating unit of CAG triplets.

[2734] Embodiment 62. The method of embodiment 54, wherein the trinucleotide repeat expansion mutation comprises a repeating unit of GAA triplets.

[2735] Embodiment 63. A method for introducing one or more changes in the nucleotide sequence of a DNA molecule at a target locus by target-primed reverse transcription, the method comprising: (a) contacting the DNA molecule at the target locus with a (i) fusion protein comprising a nucleic acid programmable DNA binding protein (napDNAbp) and a reverse transcriptase and (ii) a guide RNA comprising an RT template comprising a desired nucleotide change;

[2736] thereby conducting target-primed reverse transcription of the RT template to generate a single strand DNA comprising the desired nucleotide change;

[2737] thereby incorporating the desired nucleotide change into the DNA molecule at the target locus through a DNA repair and/or replication process.

[2738] Embodiment 64. The method of embodiment 63, wherein the RT template is located at the 3′ end of the guide RNA, the 5′ end of the guide RNA, or at an intramolecular location in the guide RNA.

[2739] Embodiment 65. The method of embodiment 63, wherein the desired nucleotide change comprises a transition, a transversion, an insertion, or a deletion, or any combination thereof.

[2740] Embodiment 66. The method of embodiment 63, wherein the desired nucleotide change comprises a transition selected from the group consisting of: (a) T to C; (b) A to G; (c) C to T; and (d) G to A.

[2741] Embodiment 67. The method of embodiment 63, wherein the desired nucleotide change comprises a transversion selected from the group consisting of: (a) T to A; (b) T to G; (c) C to G; (d) C to A; (e) A to T; (f) A to C; (g) G to C; and (h) G to T.

[2742] Embodiment 68. The method of embodiment 63, wherein the desired nucleotide change comprises changing (1) a G:C basepair to a T:A basepair, (2) a G:C basepair to an A:T basepair, (3) a G:C basepair to C:G basepair, (4) a T:A basepair to a G:C basepair, (5) a T:A basepair to an A:T basepair, (6) a T:A basepair to a C:G basepair, (7) a C:G basepair to a G:C basepair, (8) a C:G basepair to a T:A basepair, (9) a C:G basepair to an A:T basepair, (10) an A:T basepair to a T:A basepair, (11) an A:T basepair to a G:C basepair, or (12) an A:T basepair to a C:G basepair.

[2743] Embodiment 69. A method of preventing or halting the progression of a prion disease by installing on or more protective mutations into PRNP encoded by a target nucleotide sequence by prime editing, the method comprising: (a) contacting the target nucleotide sequence with a (i) prime editor comprising a nucleic acid programmable DNA binding protein (napDNAbp) and a polymerase and (ii) a PEgRNA comprising an edit template encoding the functional moiety;

[2744] thereby polymerizing a single strand DNA sequence encoding the protective mutation;

[2745] thereby incorporating the single strand DNA sequence in place of a corresponding endogenous strand at the target nucleotide sequence through a DNA repair and/or replication process;

[2746] wherein the method produces a recombinant target nucleotide sequence that encodes a PRNP comprising a protective mutation and which is resistant to misfolding.

[2747] Embodiment 70. The method of embodiment 69, wherein the prion disease is a human prion disease.

[2748] Embodiment 71. The method of embodiment 69, wherein the prion disease is an animal prion disease.

[2749] Embodiment 72. The method of embodiment 69, wherein the prion disease is Creutzfeldt-Jakob Disease (CJD), Variant Creutzfeldt-Jakob Disease (vCJD), Gerstmann-Straussler-Scheinker Syndrome, Fatal Familial Insomnia, or Kuru.

[2750] Embodiment 73. The method of embodiment 69, wherein the prion disease is Bovine Spongiform Encephalopathy (BSE or “mad cow disease”), Chronic Wasting Disease (CWD), Scrapie, Transmissible Mink Encephalopathy, Feline Spongiform Encephalopathy, and Ungulate Spongiform Encephalopathy.

[2751] Embodiment 74. The method of embodiment 69, wherein the wildtype PRNP amino acid sequence is SEQ ID NOs: 291-292.

[2752] Embodiment 75. The method of embodiment 69, wherein the method results in a modified PRNP amino acid sequence selected from the group consisting of SEQ ID NOs: 293-309, 311-323, wherein said modified PRNP protein is resistant to misfolding.

[2753] Embodiment 76. The method of embodiment 69, wherein the fusion protein comprises the amino acid sequence of PE1, PE2, or PE3.

[2754] Embodiment 77. The method of embodiment 69, wherein the napDNAbp is a Cas9 nickase (nCas9).

[2755] Embodiment 78. The method of embodiment 69, wherein the napDNAbp comprises the amino acid sequence of SEQ ID NOs: 18-88, 126, 130, 137, 141, 147, 153, 157, 445, 460, 467, and 482-487.

[2756] Embodiment 79. The method of embodiment 69, wherein the PEgRNA comprises SEQ ID NOs: 101-104, 181-183, 223-244, 277, 325-334, 336, 338, 340, 342, 344, 346, 348, 350, 352, 354, 356, 358, 360, 362, 364, 366, 368, 499-505, 735-761, 776-777.

[2757] Embodiment 80. A method of treating CDKL5 Deficiency Disorder by correcting a mutation in the cyclin-dependent kinase-like 5 gene (CDKL5) in a target nucleotide sequence by prime editing, the method comprising: (a) contacting the target nucleotide sequence with a (i) prime editor comprising a nucleic acid programmable DNA binding protein (napDNAbp) and a polymerase and (ii) a PEgRNA comprising an edit template that corrects the mutation in CDKL5;

[2758] thereby polymerizing a single strand DNA sequence encoding the edit;

[2759] thereby incorporating the single strand DNA sequence in place of a corresponding endogenous strand at the target nucleotide sequence through a DNA repair and/or replication process;

[2760] wherein the method produces a recombinant target nucleotide sequence that encodes a repaired CDKL5 gene.

[2761] Embodiment 81. The method of embodiment D80, wherein the mutation in CDKL5 is 1412de1A.

### Group E. PE Methods for Modifying Protein Structure/Function and/or Mutagenesis

[2762] Embodiment 1. A method for mutagenizing a DNA molecule at a target locus by prime editing, the method comprising: (a) contacting the DNA molecule at the target locus with a (i) fusion protein comprising a nucleic acid programmable DNA binding protein (napDNAbp) and an error-prone polymer (e.g., error-prone reverse transcriptase), and (ii) a guide RNA comprising an edit template comprising a desired nucleotide change; thereby polymerizing a single stranded DNA templated from the edit template; and incorporating the single stranded DNA into the DNA molecule at the target locus through a DNA repair and/or replication process.

[2763] Embodiment 2. The method of any prior embodiment, wherein the fusion protein comprises the amino acid sequence of PE1, PE2, or PE3.

[2764] Embodiment 3. The method of any prior embodiment, wherein the napDNAbp is a Cas9 nickase (nCas9).

[2765] Embodiment 4. The method of embodiment 1, wherein the napDNAbp comprises the amino acid sequence of SEQ ID NOs: 18-88, 126, 130, 137, 141, 147, 153, 157, 445, 460, 467, and 482-487.

[2766] Embodiment 5. The method of embodiment 1, wherein the guide RNA comprises SEQ ID NO: 222.

[2767] Embodiment 6. A method of installing an immunoepitope in a protein of interest encoded by a target nucleotide sequence by prime editing, the method comprising: (a) contacting the target nucleotide sequence with a (i) prime editor comprising a nucleic acid programmable DNA binding protein (napDNAbp) and a polymerase and (ii) a PEgRNA comprising an edit template encoding the functional moiety;

[2768] thereby polymerizing a single strand DNA sequence encoding the immunoepitope;

[2769] thereby incorporating the single strand DNA sequence in place of a corresponding endogenous strand at the target nucleotide sequence through a DNA repair and/or replication process;

[2770] wherein the method produces a recombinant target nucleotide sequence that encodes a fusion protein comprising the protein of interest and the immunoepitope.

[2771] Embodiment 7. The method of embodiment 6, wherein the immunoepitope is selected from the group consisting of: tetanus toxoid (SEQ ID NO: 396); diphtheria toxin mutant CRM197 (SEQ ID NO: 630); mumps immunoepitope 1 (SEQ ID NO: 400); mumps immunoepitope 2 (SEQ ID NO: 402); mumps immunoeptitope 3 (SEQ ID NO: 404); rubella virus (SEQ ID NO: 406); hemagglutinin (SEQ ID NO: 408); neuraminidase (SEQ ID NO: 410); TAP1 (SEQ ID NO: 412); TAP2 (SEQ ID NO: 414); hemagglutinin epitopes toward class I HLA (SEQ ID NO: 416); neuraminidase epitopes toward class I HLA (SEQ ID NO: 418); hemagglutinin epitopes toward class II HLA (SEQ ID NO: 420); neuraminidase epitopes toward class II HLA (SEQ ID NO: 422); hemagglutinin epitope H5N1-bound class I and class II HLA (SEQ ID NO: 424); and neuraminidase epitope H5N1-bound class I and class II HLA (SEQ ID NO: 426).

[2772] Embodiment 8. The method of embodiment 6, wherein the fusion protein comprises the amino acid sequence of PE1, PE2, or PE3.

[2773] Embodiment 9. The method of embodiment 6, wherein the napDNAbp is a Cas9 nickase (nCas9).

[2774] Embodiment 10. The method of embodiment 6, wherein the napDNAbp comprises the amino acid sequence of SEQ ID NOs: 18-88, 126, 130, 137, 141, 147, 153, 157, 445, 460, 467, and 482-487.

[2775] Embodiment 11. The method of embodiment 6, wherein the PEgRNA comprises SEQ ID NOs: 101-104, 181-183, 223-244, 277, 325-334, 336, 338, 340, 342, 344, 346, 348, 350, 352, 354, 356, 358, 360, 362, 364, 366, 368, 499-505, 735-761, 776-777.

[2776] Embodiment 12. A method of installing a small molecule dimerization domain in a protein of interest encoded by a target nucleotide sequence by prime editing, the method comprising: (a) contacting the target nucleotide sequence with a (i) prime editor comprising a nucleic acid programmable DNA binding protein (napDNAbp) and a polymerase, and (ii) a PEgRNA comprising an edit template encoding the small molecule dimerization domain;

[2777] thereby polymerizing a single strand DNA sequence encoding the immunoepitope;

[2778] thereby incorporating the single strand DNA sequence in place of a corresponding endogenous strand at the target nucleotide sequence through a DNA repair and/or replication process;

[2779] wherein the method produces a modified target nucleotide sequence that encodes a fusion protein comprising the protein of interest and the small molecule dimerization domain.

[2780] Embodiment 13. The method of embodiment 12 further comprising conducting the method on a second protein of interest.

[2781] Embodiment 14. The method of embodiment 13, wherein the first protein of interest and the second protein of interest dimerize in the presence of a small molecule that binds to the dimerization domain on each of said proteins.

[2782] Embodiment 15. The method of embodiment 12, wherein the small molecule binding domain is FKBP12 of SEQ ID NO: 488.

[2783] Embodiment 16. The method of embodiment 12, wherein the small molecule binding domain is FKBP12-F36V of SEQ ID NO: 489.

[2784] Embodiment 17. The method of embodiment 12, wherein the small molecule binding domain is cyclophilin of SEQ ID NOs: 490 and 493-494.

[2785] Embodiment 18. The method of embodiment 12, wherein the small molecule is a dimer of a small molecule as described herein.

[2786] Embodiment 19. The method of embodiment 12, wherein the fusion protein comprises the amino acid sequence of PE1, PE2, or PE3.

[2787] Embodiment 20. The method of embodiment 12, wherein the napDNAbp is a Cas9 nickase (nCas9).

[2788] Embodiment 21. The method of embodiment 12, wherein the napDNAbp comprises the amino acid sequence of SEQ ID NOs: 18-88, 126, 130, 137, 141, 147, 153, 157, 445, 460, 467, and 482-487.

[2789] Embodiment 22. The method of embodiment 12, wherein the PEgRNA comprises SEQ ID NOs: 101-104, 181-183, 223-244, 277, 325-334, 336, 338, 340, 342, 344, 346, 348, 350, 352, 354, 356, 358, 360, 362, 364, 366, 368, 499-505, 735-761, 776-777.

[2790] Embodiment 23. A method of installing a peptide tag or epitope onto a protein using prime editing, comprising: contacting a target nucleotide sequence encoding the protein with a prime editor construct configured to insert therein a second nucleotide sequence encoding the peptide tag to result in a recombinant nucleotide sequence, such that the peptide tag and the protein are expressed from the recombinant nucleotide sequence as a fusion protein.

[2791] Embodiment 24. The method of embodiment 23, wherein the peptide tag is used for purification and/or detection of the protein.

[2792] Embodiment 25. The method of embodiment 23, wherein the peptide tag is a poly-histidine (e.g., HHHHHH SEQ ID NOs: 252-262), FLAG (e.g., DYKDDDDK) (SEQ ID NO: 2), V5 (e.g., GKPIPNPLLGLDST) (SEQ ID NO: 3), GCN4, HA (e.g., YPYDVPDYA) (SEQ ID NO: 5), Myc (e.g. EQKLISEED) (SEQ ID NO: 6), or GST.

[2793] Embodiment 26. The method of embodiment 23, wherein the peptide tag has an amino acid sequence selected from the group consisting of SEQ ID NO: 1-6, 245-249, 252-262, 264-273, 275-276, 281, 278-288, and 622.

[2794] Embodiment 27. The method of embodiment 23, wherein the peptide tag is fused to the protein by a linker.

[2795] Embodiment 28. The method of embodiment 23, wherein the fusion protein has the following structure: [protein]-[peptide tag] or [peptide tag]-[protein], wherein “]-[” represents an optional linker.

[2796] Embodiment 29. The method of embodiment 23, wherein the linker has an amino acid sequence of SEQ ID NO: 127, 165-176, 446, 453, and 767-769.

[2797] Embodiment 30. The method of embodiment 23, wherein the prime editor construct comprises a PEgRNA comprising the nucleotide sequence of SEQ ID NOs: 101-104, 181-183, 223-244, 277, 325-334, 336, 338, 340, 342, 344, 346, 348, 350, 352, 354, 356, 358, 360, 362, 364, 366, 368, 499-505, 735-761, 776-777.

[2798] Embodiment 31. The method of embodiment 23, wherein the PEgRNA comprises a spacer, a gRNA core, and an extension arm, wherein the spacer is complementary to the target nucleotide sequence and the extension arm comprises a reverse transcriptase template that encodes the peptide tag.

[2799] Embodiment 32. The method of embodiment 23, wherein the PEgRNA comprises a spacer, a gRNA core, and an extension arm, wherein the spacer is complementary to the target nucleotide sequence and the extension arm comprises a reverse transcriptase template that encodes the peptide tag.

[2800] Embodiment 33. A method of installing or deleting a functional moiety in a protein of interest encoded by a target nucleotide sequence by prime editing, the method comprising: (a) contacting the target nucleotide sequence with a (i) prime editor comprising a nucleic acid programmable DNA binding protein (napDNAbp) and a polymerase and (ii) a PEgRNA comprising an edit template encoding the functional moiety or deletion of same; (b) polymerizing a single strand DNA sequence encoding the functional moiety or deletion of same; and (c) incorporating the single strand DNA sequence in place of a corresponding endogenous strand at the target nucleotide sequence through a DNA repair and/or replication process, wherein the method produces a recombinant target nucleotide sequence that encodes a modified protein comprising the protein of interest and the functional moiety or the removal of same, wherein the functional moiety alters a modification state or localization state of the protein.

[2801] Embodiment 34. The method of embodiment 33, wherein functional moiety alters the phosphorylation, ubiquitylation, glycosylation, lipidation, hydroxylation, methylation, acetylation, crotonylation, or SUMOylation state of the protein of interest.

### Group F. PE Delivery Methods and Compositions

[2802] Embodiment 1. A polypeptide comprising an N-terminal half or a C-terminal half of a prime editor fusion protein.

[2803] Embodiment 2. The polypeptide of embodiment 1, wherein the prime editor fusion protein comprises a nucleic acid programmable DNA binding protein (napDNAbp) domain and a polymerase domain.

[2804] Embodiment 3. The polypeptide of embodiment 1, wherein the prime editor fusion protein is capable of carrying out prime editing in the presence of a prime editing guide RNA (PEgRNA).

[2805] Embodiment 4. The polypeptide of embodiment 2, wherein the napDNAbp is a Cas9 protein or variant thereof.

[2806] Embodiment 5. The polypeptide of embodiment 2, wherein the napDNAbp is a nuclease with nickase activity.

[2807] Embodiment 6. The polypeptide of embodiment 2, wherein the napDNAbp is a nuclease active Cas9, a nuclease inactive Cas9 (dCas9), or a Cas9 nickase (nCas9).

[2808] Embodiment 7. The polypeptide of embodiment 2, wherein the napDNAbp is selected from the group consisting of: Cas9, Cas12e, Cas12d, Cas12a, Cas12b1, Cas13a, Cas12c, and Argonaute and optionally has a nickase activity.

[2809] Embodiment 8. The polypeptide of embodiment 1, wherein the polypeptide is formed by splitting a prime editor fusion protein at a split site.

[2810] Embodiment 9. The polypeptide of embodiment 8, wherein the split site is a peptide bond in the napDNAbp domain.

[2811] Embodiment 10. The polypeptide of embodiment 8, wherein the split site is a peptide bond in the polymerase domain.

[2812] Embodiment 11. The polypeptide of embodiment 8, wherein the split site is a peptide bond in a linker between the napDNAbp domain and the polymerase domain.

[2813] Embodiment 12. The polypeptide of embodiment 9, wherein the split site is in the peptide bond between residues 1 and 2, 2 and 3, 3 and 4, 4 and 5, 5 and 6, 6 and 7, 7 and 8, 8 and 9, 9 and 10, 10 and 11, 11 and 12, 12 and 13, 13 and 14, 14 and 15, 16 and 17, 17 and 18, 18 and 19, 19 and 20, 20 and 21, 21 and 22, 22 and 23, 23 and 24, 24 and 25, 25 and 26, 26 and 27, 27 ad 28, 28 and 29, 29 and 30, 30 and 31, 31 and 32, 32 and 33, 33 and 34, 34 and 35, 35 and 36, 36 and 37, 37 and 38, 38 and 39, 39 and 40, 40 and 41, 41 and 42, 42 and 43, 43 and 44, 44 and 45, 45 and 46, 46 and 47, 47 and 48, 48 and 49, 49 and 50, or between any two residues between residues 50-100, 100-150, 150-200, 200-250, 250-300, 300-350, 350-400, 400-450, 450-500, 500-600, 600-700, 700-800, 800-900, 900-1000, 1000-1100, 1100-1200, 1200-1300, or 1300-1368 of SEQ ID NO: 18 (canonical SpCas9), or between any two equivalent amino acid residues of an SpCas9 homolog or equivalent of SEQ ID NO: 18.

[2814] Embodiment 13. The polypeptide of embodiment 9, wherein the split site is in the peptide bond between residues 1 and 2, 2 and 3, 3 and 4, 4 and 5, 5 and 6, 6 and 7, 7 and 8, 8 and 9, 9 and 10, 10 and 11, 11 and 12, 12 and 13, 13 and 14, 14 and 15, 16 and 17, 17 and 18, 18 and 19, 19 and 20, 20 and 21, 21 and 22, 22 and 23, 23 and 24, 24 and 25, 25 and 26, 26 and 27, 27 ad 28, 28 and 29, 29 and 30, 30 and 31, 31 and 32, 32 and 33, 33 and 34, 34 and 35, 35 and 36, 36 and 37, 37 and 38, 38 and 39, 39 and 40, 40 and 41, 41 and 42, 42 and 43, 43 and 44, 44 and 45, 45 and 46, 46 and 47, 47 and 48, 48 and 49, 49 and 50, or between any two residues between residues 50-100, 100-150, 150-200, 200-250, 250-300, 300-350, 350-400, 400-450, 450-500, 500-600, or 600-667 of SEQ ID NO: 89 (canonical reverse transcriptase, M-MLV RT), or between any two equivalent amino acid residues of a reverse transcriptase homolog or equivalent of SEQ ID NO: 89.

[2815] Embodiment 14. The polypeptide of embodiment 1, wherein the polypeptide is an N-terminal half of a prime editor fusion protein.

[2816] Embodiment 15. The polypeptide of embodiment 1, wherein the polypeptide is a C-terminal half of a prime editor fusion protein.

[2817] Embodiment 16. A nucleotide sequence encoding a polypeptide of any of embodiments 1-15 and optionally a PEgRNA.

[2818] Embodiment 17. A virus genome comprising a nucleotide sequence encoding a polypeptide of any of embodiments 1-15 and optionally a PEgRNA.

[2819] Embodiment 18. The virus genome of embodiment 17, wherein the nucleotide sequence further comprises a promoter sequence suitable for expressing the polypeptide of any of embodiments 1-15.

[2820] Embodiment 19. The virus genome of embodiment 17, wherein the nucleotide sequence further comprises a sequence encoding a PEgRNA.

[2821] Embodiment 20. A virus particle comprising a genome comprising a nucleotide sequence encoding a polypeptide of any of embodiments 1-15 and optionally a PEgRNA.

[2822] Embodiment 21. The virus particle of embodiment 20, wherein the virus particle is an adenovirus particle, an adeno-associated virus particle, or a lentivirus particle.

[2823] Embodiment 22. The virus particle of embodiment 20, wherein the polypeptide encoded by the genome is an N terminal half of a prime editor fusion protein.

[2824] Embodiment 23. The virus particle of embodiment 20, wherein the polypeptide encoded by the genome is a C terminal half of a prime editor fusion protein.

[2825] Embodiment 24. A pharmaceutical composition comprising a virus particle of any of embodiments 20-23 and a pharmaceutical excipient.

[2826] Embodiment 25. A pharmaceutical composition comprising a virus particle of embodiment 22 (encoding the N terminal half) and a pharmaceutical excipient.

[2827] Embodiment 26. A pharmaceutical composition comprising a virus particle of embodiment 23 (encoding the C terminal half) and a pharmaceutical excipient.

[2828] Embodiment 27. A ribonucleoprotein (RNP) complex comprising a nucleotide sequence encoding a polypeptide of any of embodiments 1-15 and optionally a PEgRNA.

[2829] Embodiment 28. The ribonucleoprotein (RNP) complex of embodiment 27, wherein the polypeptide encoded by the genome is an N-terminal half of a prime editor fusion protein.

[2830] Embodiment 29. The ribonucleoprotein (RNP) complex of embodiment 27, wherein the polypeptide encoded by the genome is a C-terminal half of a prime editor fusion protein.

[2831] Embodiment 30. A pharmaceutical composition comprising a ribonucleoprotein (RNP) complex of any of embodiments 27-29 and a pharmaceutical excipient.

[2832] Embodiment 31. A pharmaceutical composition comprising the ribonucleoprotein (RNP) complex of embodiment 28 (encoding the N-terminal half) and a pharmaceutical excipient.

[2833] Embodiment 32. A pharmaceutical composition comprising the ribonucleoprotein (RNP) complex of embodiment 29 (encoding the C-terminal half) and a pharmaceutical excipient.

[2834] Embodiment 33. A pharmaceutical composition comprising a first AAV particle and a second AAV particle, wherein the first AAV vector expresses an N-terminal half of a prime editor fusion protein and the second AAV vector expresses a C-terminal half of a prime editor fusion protein, wherein the N-terminal half and the C-terminal half are combined within the cell to reconstitute the prime editor.

[2835] Embodiment 34. The pharmaceutical composition of embodiment 33, wherein the first or second AAV particle also expresses a PEgRNA that targets the reconstituted prime editor to a target DNA site.

[2836] Embodiment 35. The pharmaceutical composition of embodiment 33, wherein the prime editor fusion protein comprises a nucleic acid programmable DNA binding protein (napDNAbp) domain and a polymerase domain.

[2837] Embodiment 36. The pharmaceutical composition of embodiment 33, wherein the prime editor fusion protein is capable of carrying out prime editing in the presence of a prime editing guide RNA (PEgRNA).

[2838] Embodiment 37. The pharmaceutical composition of embodiment 35, wherein the napDNAbp is a Cas9 protein or variant thereof.

[2839] Embodiment 38. The pharmaceutical composition of embodiment 35, wherein the napDNAbp is a nuclease with a nickase activity.

[2840] Embodiment 39. The pharmaceutical composition of embodiment 35, wherein the napDNAbp is a nuclease active Cas9, a nuclease inactive Cas9 (dCas9), or a Cas9 nickase (nCas9).

[2841] Embodiment 40. The pharmaceutical composition of embodiment 35, wherein the napDNAbp is selected from the group consisting of: Cas9, Cas12e, Cas12d, Cas12a, Cas12b1, Cas13a, Cas12c, and Argonaute and optionally has a nickase activity.

[2842] Embodiment 41. The pharmaceutical composition of embodiment 33, wherein N-terminal and C-terminal halves are formed by splitting the prime editor fusion protein at a split site.

[2843] Embodiment 42. The pharmaceutical composition of embodiment 41, wherein the split site is a peptide bond in a napDNAbp domain.

[2844] Embodiment 43. The pharmaceutical composition of embodiment 41, wherein the split site is a peptide bond in a polymerase domain.

[2845] Embodiment 44. The pharmaceutical composition of embodiment 41, wherein the split site is a peptide bond in a linker.

[2846] Embodiment 45. The pharmaceutical composition of embodiment 41, wherein the split site is in the peptide bond between residues 1 and 2, 2 and 3, 3 and 4, 4 and 5, 5 and 6, 6 and 7, 7 and 8, 8 and 9, 9 and 10, 10 and 11, 11 and 12, 12 and 13, 13 and 14, 14 and 15, 16 and 17, 17 and 18, 18 and 19, 19 and 20, 20 and 21, 21 and 22, 22 and 23, 23 and 24, 24 and 25, 25 and 26, 26 and 27, 27 ad 28, 28 and 29, 29 and 30, 30 and 31, 31 and 32, 32 and 33, 33 and 34, 34 and 35, 35 and 36, 36 and 37, 37 and 38, 38 and 39, 39 and 40, 40 and 41, 41 and 42, 42 and 43, 43 and 44, 44 and 45, 45 and 46, 46 and 47, 47 and 48, 48 and 49, 49 and 50, or between any two residues between residues 50-100, 100-150, 150-200, 200-250, 250-300, 300-350, 350-400, 400-450, 450-500, 500-600, 600-700, 700-800, 800-900, 900-1000, 1000-1100, 1100-1200, 1200-1300, or 1300-1368 of SEQ ID NO: 18 (canonical SpCas9), or between any two equivalent amino acid residues of an SpCas9 homolog or equivalent of SEQ ID NO: 18.

[2847] Embodiment 46. The pharmaceutical composition of embodiment 41, wherein the split site is in the peptide bond between residues 1 and 2, 2 and 3, 3 and 4, 4 and 5, 5 and 6, 6 and 7, 7 and 8, 8 and 9, 9 and 10, 10 and 11, 11 and 12, 12 and 13, 13 and 14, 14 and 15, 16 and 17, 17 and 18, 18 and 19, 19 and 20, 20 and 21, 21 and 22, 22 and 23, 23 and 24, 24 and 25, 25 and 26, 26 and 27, 27 ad 28, 28 and 29, 29 and 30, 30 and 31, 31 and 32, 32 and 33, 33 and 34, 34 and 35, 35 and 36, 36 and 37, 37 and 38, 38 and 39, 39 and 40, 40 and 41, 41 and 42, 42 and 43, 43 and 44, 44 and 45, 45 and 46, 46 and 47, 47 and 48, 48 and 49, 49 and 50, or between any two residues between residues 50-100, 100-150, 150-200, 200-250, 250-300, 300-350, 350-400, 400-450, 450-500, 500-600, or 600-667 of SEQ ID NO: 89 (canonical reverse transcriptase, M-MLV RT), or between any two equivalent amino acid residues of a reverse transcriptase homolog or equivalent of SEQ ID NO: 89.

[2848] Embodiment 47. The pharmaceutical composition of embodiment 33, wherein the N-terminal half of the prime editor fusion protein has an amino acid sequence encoding the N-terminal prime editor fusion proteins as described herein.

[2849] Embodiment 48. The pharmaceutical composition of embodiment 33, wherein the C-terminal half of the prime editor fusion protein has an amino acid sequence encoding the N-terminal prime editor fusion proteins as described herein.

[2850] Embodiment 49. A method of delivering a prime editor fusion protein to a cell comprising transfecting the cell with a first AAV particle and a second AAV particle, wherein the first AAV vector expresses an N-terminal half of a prime editor fusion protein and the second AAV vector expresses a C-terminal half of a prime editor fusion protein, wherein the N-terminal half and the C-terminal half are combined within the cell to reconstitute the prime editor fusion protein.

[2851] Embodiment 50. The method of embodiment 49, wherein the first or second AAV particle also expresses a PEgRNA that targets the reconstituted prime editor to a target DNA site.

[2852] Embodiment 51. The method of embodiment 49, wherein the prime editor fusion protein comprises a nucleic acid programmable DNA binding protein (napDNAbp) domain and a polymerase domain.

[2853] Embodiment 52. The method of embodiment 49, wherein the prime editor fusion protein is capable of carrying out prime editing in the presence of an prime editing guide RNA (PEgRNA).

[2854] Embodiment 53. The method of embodiment 51, wherein the napDNAbp is a Cas9 protein or variant thereof.

[2855] Embodiment 54. The method of embodiment 53, wherein the napDNAbp is a nuclease with nickase activity.

[2856] Embodiment 55. The method of embodiment 53, wherein the napDNAbp is a nuclease active Cas9, a nuclease inactive Cas9 (dCas9), or a Cas9 nickase (nCas9).

[2857] Embodiment 56. The method of embodiment 53, wherein the napDNAbp is selected from the group consisting of: Cas9, Cas12e, Cas12d, Cas12a, Cas12b1, Cas13a, Cas12c, and Argonaute and optionally has a nickase activity.

[2858] Embodiment 57. The method of embodiment 49, wherein N-terminal and C-terminal halves are formed by splitting the prime editor fusion protein at a split site.

[2859] Embodiment 58. The method of embodiment 57, wherein the split site is a peptide bond in a napDNAbp domain.

[2860] Embodiment 59. The method of embodiment 57, wherein the split site is a peptide bond in a polymerase domain.

[2861] Embodiment 60. The method of embodiment 57, wherein the split site is a peptide bond in a linker.

[2862] Embodiment 61. The method of embodiment 57, wherein the split site is in the peptide bond between residues 1 and 2, 2 and 3, 3 and 4, 4 and 5, 5 and 6, 6 and 7, 7 and 8, 8 and 9, 9 and 10, 10 and 11, 11 and 12, 12 and 13, 13 and 14, 14 and 15, 16 and 17, 17 and 18, 18 and 19, 19 and 20, 20 and 21, 21 and 22, 22 and 23, 23 and 24, 24 and 25, 25 and 26, 26 and 27, 27 ad 28, 28 and 29, 29 and 30, 30 and 31, 31 and 32, 32 and 33, 33 and 34, 34 and 35, 35 and 36, 36 and 37, 37 and 38, 38 and 39, 39 and 40, 40 and 41, 41 and 42, 42 and 43, 43 and 44, 44 and 45, 45 and 46, 46 and 47, 47 and 48, 48 and 49, 49 and 50, or between any two residues between residues 50-100, 100-150, 150-200, 200-250, 250-300, 300-350, 350-400, 400-450, 450-500, 500-600, 600-700, 700-800, 800-900, 900-1000, 1000-1100, 1100-1200, 1200-1300, or 1300-1368 of SEQ ID NO: 18 (canonical SpCas9), or between any two equivalent amino acid residues of an SpCas9 homolog or equivalent of SEQ ID NO: 18.

[2863] Embodiment 62. The method of embodiment 57, wherein the split site is in the peptide bond between residues 1 and 2, 2 and 3, 3 and 4, 4 and 5, 5 and 6, 6 and 7, 7 and 8, 8 and 9, 9 and 10, 10 and 11, 11 and 12, 12 and 13, 13 and 14, 14 and 15, 16 and 17, 17 and 18, 18 and 19, 19 and 20, 20 and 21, 21 and 22, 22 and 23, 23 and 24, 24 and 25, 25 and 26, 26 and 27, 27 ad 28, 28 and 29, 29 and 30, 30 and 31, 31 and 32, 32 and 33, 33 and 34, 34 and 35, 35 and 36, 36 and 37, 37 and 38, 38 and 39, 39 and 40, 40 and 41, 41 and 42, 42 and 43, 43 and 44, 44 and 45, 45 and 46, 46 and 47, 47 and 48, 48 and 49, 49 and 50, or between any two residues between residues 50-100, 100-150, 150-200, 200-250, 250-300, 300-350, 350-400, 400-450, 450-500, 500-600, or 600-667 of SEQ ID NO: 89 (canonical reverse transcriptase, M-MLV RT), or between any two equivalent amino acid residues of a reverse transcriptase homolog or equivalent of SEQ ID NO: 89.

[2864] Embodiment 63. The method of embodiment 49, wherein the N-terminal half of the prime editor fusion protein has an amino acid sequence encoding the N-terminal prime editor fusion proteins as described herein.

[2865] Embodiment 64. The method of embodiment 49, wherein the C-terminal half of the prime editor fusion protein has an amino acid sequence encoding the C-terminal prime editor fusion proteins as described herein.

[2866] Embodiment 65. The method of embodiment 49, wherein the first AAV particle comprises a recombinant AAV genome comprising a nucleotide sequence which encodes the first prime editor component.

[2867] Embodiment 66. The method of embodiment 49, wherein the second AAV particle comprises a recombinant AAV genome comprising a nucleotide sequence which encodes the second prime editor component.

[2868] Embodiment 67. The method of embodiment 49, wherein the transfecting step is conducted in vivo.

[2869] Embodiment 68. The method of embodiment 49, wherein the transfecting step is conducted ex vivo.

[2870] Embodiment 69. The method of embodiment 50, wherein the target DNA site is a disease-associated gene.

[2871] Embodiment 70. The method of embodiment 69, wherein the disease-associated gene is associated with a monogentic disorder selected from the group consisting of: Adenosine Deaminase (ADA) Deficiency; Alpha-1 Antitrypsin Deficiency; Cystic Fibrosis; Duchenne Muscular Dystrophy; Galactosemia; Hemochromatosis; Huntington's Disease; Maple Syrup Urine Disease; Marfan Syndrome; Neurofibromatosis Type 1; Pachyonychia Congenita; Phenylkeotnuria; Severe Combined Immunodeficiency; Sickle Cell Disease; Smith-Lemli-Opitz Syndrome; a trinucleotide repeat disorder; a prion disease; and Tay-Sachs Disease.

[2872] Embodiment 71. The method of embodiment 69, wherein the disease-associated gene is associated with a polygenic disorder selected from the group consisting of: heart disease; high blood pressure; Alzheimer's disease; arthritis; diabetes; cancer; and obesity.

[2873] Embodiment 72. The method of embodiment 51, wherein the programmable DNA binding protein (napDNAbp) domain.

[2874] Embodiment 73. The method of embodiment 51, wherein the polymerase domain is a reverse transcriptase.

[2875] Embodiment 74. The method of embodiment 73, wherein the reverse transcriptase comprises any one of the amino acid sequences of SEQ ID NOs: 89-100, 105-122, 128-129, 132, 139, 143, 149, 154, 159, 235, 454, 471, 516, 662, 700, 701-716, 739-741, and 766.

[2876] Embodiment 75. The method of embodiment 73, wherein the reverse transcriptase comprises an amino acid sequence having at least 80%, 85%, 90%, 95%, 98%, or 99% sequence identity with the amino acid sequence of any one of SEQ ID NOs: 89-100, 105-122, 128-129, 132, 139, 143, 149, 154, 159, 235, 454, 471, 516, 662, 700, 701-716, 739-741, and 766.

[2877] Embodiment 76. The method of embodiment 73, wherein the napDNAbp comprises an amino acid sequence of SEQ ID NO: 18.

[2878] Embodiment 77. The method of embodiment 73, wherein the napDNAbp comprises an amino acid sequence having at least 80%, 85%, 90%, 95%, 98%, or 99% sequence identity with the amino acid sequence of any one of SEQ ID NOs: 18-88, 126, 130, 137, 141, 147, 153, 157, 445, 460, 467, and 482-487. Embodiment 78. The polypeptide of embodiment 8, wherein the split site is between 1023 and 1024 of SEQ ID NO: 18, or at a corresponding position in an amino acid sequence having at least 85%, at least 90%, at least 95%, at least 99%, or at least 99.5% sequence identity with SEQ ID NO: 18.

### Group G. PE Methods for Modifying RNA Structure/Function

[2879] Embodiment 1. A method of installing a ribonucleotide motif or tag in an RNA of interest encoded by a target nucleotide sequence by prime editing, the method comprising: (a) contacting the target nucleotide sequence with a (i) prime editor comprising a nucleic acid programmable DNA binding protein (napDNAbp) and a polymerase, and (ii) a PEgRNA comprising an edit template encoding the ribonucleotide motif or tag; thereby polymerizing a single strand DNA sequence encoding the ribonucleotide motif or tag; and incorporating the single strand DNA sequence in place of a corresponding endogenous strand at the target nucleotide sequence through a DNA repair and/or replication process, wherein the method produces a target nucleotide sequence that encodes a modified RNA of interest comprising the ribonucleotide motif or tag.

[2880] Embodiment 2. The method of embodiment 1, wherein ribonucleotide motif or tag is a detection moiety.

[2881] Embodiment 3. The method of embodiment 1, wherein the ribonucleotide motif or tag affects the expression level of the RNA of interest.

[2882] Embodiment 4. The method of embodiment 1, wherein the ribonucleotide motif or tag affects the transport or subcellular location of the RNA of interest.

[2883] Embodiment 5. The method of embodiment 1, wherein the ribonucleotide motif or tag is selected from the group consisting of SV40 type 1, SV40 type 2, SV40 type 3, hGH, BGH, rbGlob, TK, MALAT1 ENE-mascRNA, KSHV PAN ENE, Smbox/U1 snRNA box, U1 snRNA 3′ box, tRNA-lysine, broccoli aptamer, spinach aptamer, mango aptamer, HDV ribozyme, and m6A.

[2884] Embodiment 6. The method of embodiment 1, wherein the PEgRNA comprises SEQ ID NOs: 101-104, 181-183, 223-244, 277, 325-334, 336, 338, 340, 342, 344, 346, 348, 350, 352, 354, 356, 358, 360, 362, 364, 366, 368, 499-505, 735-761, 776-777 (see Table).

[2885] Embodiment 7. The method of embodiment 1, wherein the fusion protein comprises the amino acid sequence of PE1, PE2, or PE3.

[2886] Embodiment 8. The method of embodiment 1, wherein the napDNAbp is a Cas9 nickase (nCas9).

[2887] Embodiment 9. The method of embodiment 1, wherein the napDNAbp comprises the amino acid sequence of SEQ ID NOs: 18-88, 126, 130, 137, 141, 147, 153, 157, 445, 460, 467, and 482-487.

### Group H. PE Methods for Making Gene Libraries

[2888] Embodiment 1. A method of constructing a programmed mutant gene library by prime editing, the method comprising:

[2889] (a) contacting a library of target nucleotide sequences each comprising one or more target genetic loci with a (i) prime editor comprising a nucleic acid programmable DNA binding protein (napDNAbp) and a polymerase, and (ii) a PEgRNA comprising an edit template comprising a sequence having at least one genetic change relative to the one or more target genetic loci;

[2890] thereby polymerizing a single strand DNA sequence templated by the edit template; and

[2891] incorporating the single strand DNA sequence in place of the one or more target genetic loci through a DNA repair and/or replication process, thereby incorporating the at least one genetic change into the target genetic loci of the target nucleotide sequences of said library.

[2892] Embodiment 2. The method of embodiment 1, wherein the library is a plasmid library.

[2893] Embodiment 3. The method of embodiment 1, wherein the library is a phage library.

[2894] Embodiment 4. The method of embodiment 1, wherein the one or more target genetic loci comprise a region encoding a protein.

[2895] Embodiment 5. The method of embodiment 1, wherein the one or more target genetic loci comprise a region encoding a secondary structure motif of a protein.

[2896] Embodiment 6. The method of embodiment 5, wherein the secondary structure motif is an alpha helix.

[2897] Embodiment 7. The method of embodiment 5, wherein the secondary structure motif is a beta sheet.

[2898] Embodiment 8. The method of embodiment 1, wherein the napDNAbp is a Cas9 protein or variant thereof.

[2899] Embodiment 9. The method of embodiment 1, wherein the napDNAbp is a nuclease with a nickase activity.

[2900] Embodiment 10. The method of embodiment 1, wherein the napDNAbp is a nuclease active Cas9, a nuclease inactive Cas9 (dCas9), or a Cas9 nickase (nCas9).

[2901] Embodiment 11. The method of embodiment 1, wherein the napDNAbp comprises an amino acid sequence of SEQ ID NO: 18.

[2902] Embodiment 12. The method of embodiment 1, wherein the napDNAbp comprises an amino acid sequence having at least 80%, 85%, 90%, 95%, 98%, or 99% sequence identity with the amino acid sequence of any one of SEQ ID NOs: 18-88, 126, 130, 137, 141, 147, 153, 157, 445, 460, 467, and 482-487.

[2903] Embodiment 13. The method of embodiment 1, wherein the polymerase domain is a reverse transcriptase.

[2904] Embodiment 14. The method of embodiment 13, wherein the reverse transcriptase comprises any one of the amino acid sequences of SEQ ID NOs: 89-100, 105-122, 128-129, 132, 139, 143, 149, 154, 159, 235, 454, 471, 516, 662, 700, 701-716, 739-741, and 766.

[2905] Embodiment 15. The method of embodiment 14, wherein the reverse transcriptase comprises an amino acid sequence having at least 80%, 85%, 90%, 95%, 98%, or 99% sequence identity with the amino acid sequence of any one of SEQ ID NOs: 89-100, 105-122, 128-129, 132, 139, 143, 149, 154, 159, 235, 454, 471, 516, 662, 700, 701-716, 739-741, and 766.

[2906] Embodiment 16. The method of embodiment 1, wherein the at least one genetic change in the edit template is an insertion.

[2907] Embodiment 17. The method of embodiment 1, wherein the at least one genetic change in the edit template is a deletion.

[2908] Embodiment 18. The method of embodiment 1, wherein the at least one genetic change in the edit template is substitution.

[2909] Embodiment 19. The method of embodiment 1, wherein the at least one genetic change is an insertion of one or more codons.

[2910] Embodiment 20. The method of embodiment 1, wherein the at least one genetic change is a deletion of one or more codons.

[2911] Embodiment 21. The method of embodiment 1, wherein the at least one genetic change is the insertion of a stop codon.

[2912] Embodiment 22. The method of embodiment 1, wherein the at least one genetic change is the conversion of a non-stop codon to a stop codon.

[2913] Embodiment 23. The method of embodiment 1, wherein the method is conduct simultaneously at least 2, or 3, or 4, or 5, or 6, or 7, or 8, or 9, or 10, or between 10-100, or between 100-200, or between 200-300, or between 300-400, or between 400-500 target genetic loci in each of the target nucleotide sequences of the library.

[2914] Embodiment 24. The method of embodiment 1, wherein the method is conducted during PACE or PANCE evolution, and wherein each instance of incorporating the at least one genetic change into the target genetic loci of the target nucleotide sequences of said library also installs a new target sequence.

### Group I. PE Methods for Off-Target Detection

[2915] Embodiment 1. A method of evaluating off-target editing by a prime editor, the method comprising:

[2916] (a) contacting a target nucleotide sequence having an edit site with a (i) prime editor fusion protein comprising a nucleic acid programmable DNA binding protein (napDNAbp) and a polymerase and (ii) a PEgRNA comprising a DNA synthesis template that encodes a detectable sequence;

[2917] wherein the PEgRNA complexes with the fusion protein and guides said fusion protein to the edit site and, if present, to one or more off-target sites;

[2918] and wherein the prime editor fusion protein installs the detectable sequence at the edit site, and, if present, at the one or more off-target sites;

[2919] (b) determining the nucleotide sequence of the edit site and the one or more off-target sites.

[2920] Embodiment 2. The method of embodiment 1, wherein the target nucleotide sequence is a genome.

[2921] Embodiment 3. The method of embodiment 1, wherein the step of contacting is in vitro.

[2922] Embodiment 4. The method of embodiment 1, wherein the step of contacting is in vivo.

[2923] Embodiment 5. The method of embodiment 1, wherein the edit site is a mutation in a disease-associated gene.

[2924] Embodiment 6. The method of embodiment 5, wherein the mutation is a single base substitution, insertion, deletion, or inversion.

[2925] Embodiment 7. The method of embodiment 1, wherein the disease-associated gene is associated with a monogentic disorder selected from the group consisting of: Adenosine Deaminase (ADA) Deficiency; Alpha-1 Antitrypsin Deficiency; Cystic Fibrosis; Duchenne Muscular Dystrophy; Galactosemia; Hemochromatosis; Huntington's Disease; Maple Syrup Urine Disease; Marfan Syndrome; Neurofibromatosis Type 1; Pachyonychia Congenita; Phenylkeotnuria; Severe Combined Immunodeficiency; Sickle Cell Disease; Smith-Lemli-Opitz Syndrome; and Tay-Sachs Disease.

[2926] Embodiment 8. The method of embodiment 1, wherein the disease-associated gene is associated with a polygenic disorder selected from the group consisting of: heart disease; high blood pressure; Alzheimer's disease; arthritis; diabetes; cancer; and obesity.

[2927] Embodiment 9. The method of embodiment 1, wherein the fusion protein has an amino acid sequence of SEQ ID NOs: 101-104, 181-183, 223-244, 277, 325-334, 336, 338, 340, 342, 344, 346, 348, 350, 352, 354, 356, 358, 360, 362, 364, 366, 368, 499-505, 735-761, 776-777, or an amino acid sequence having at least 80%, 85%, 90%, 95%, 98%, or 99% sequence identity with SEQ ID NOs: 101-104, 181-183, 223-244, 277, 325-334, 336, 338, 340, 342, 344, 346, 348, 350, 352, 354, 356, 358, 360, 362, 364, 366, 368, 499-505, 735-761, 776-777.

[2928] Embodiment 10. The method of embodiment 1, wherein the napDNAbp is Cas9, Cas12e, Cas12d, Cas12a, Cas12b1, Cas13a, Cas12c, or Argonaute, or a variant of Cas9, Cas12e, Cas12d, Cas12a, Cas12b1, Cas13a, Cas12c, or Argonaute.

[2929] Embodiment 11. The method of embodiment 1, wherein the napDNAbp is a Cas9 or variant thereof.

[2930] Embodiment 12. The method of embodiment 1, wherein the napDNAbp is a nuclease active Cas9, a nuclease inactive Cas9 (dCas9), or a Cas9 nickase (nCas9).

[2931] Embodiment 13. The method of embodiment 1, wherein the napDNAbp is Cas9 nickase (nCas9).

[2932] Embodiment 14. The method of embodiment 1, wherein the napDNAbp comprises the amino acid sequence of SEQ ID NO: 18, or an amino acid sequence having at least 80%, 85%, 90%, 95%, 98%, or 99% sequence identity with SEQ ID NO: 18.

[2933] Embodiment 15. The method of embodiment 1, wherein the napDNAbp is SpCas9 wild type or a variant thereof of any one of amino acid sequences SEQ ID NOs: 18-88, 126, 130, 137, 141, 147, 153, 157, 445, 460, 467, and 482-487, or an amino acid sequence having at least 80%, 85%, 90%, 95%, 98%, or 99% sequence identity with any of SEQ ID NOs: 18-88, 126, 130, 137, 141, 147, 153, 157, 445, 460, 467, and 482-487.

[2934] Embodiment 16. The method of embodiment 1, wherein the napDNAbp is an SpCas9 ortholog.

[2935] Embodiment 17. The method of embodiment 1, wherein the napDNAbp is any one of amino acid sequences SEQ ID NOs: 18-88, 126, 130, 137, 141, 147, 153, 157, 445, 460, 467, and 482-487, or an amino acid sequence having at least 80%, 85%, 90%, 95%, 98%, or 99% sequence identity with any of SEQ ID NOs: 18-88, 126, 130, 137, 141, 147, 153, 157, 445, 460, 467, and 482-487.

[2936] Embodiment 18. The method of embodiment 1, wherein the napDNAbp comprises an amino acid sequence having at least 80%, 85%, 90%, 95%, 98%, or 99% sequence identity with the amino acid sequence of any one of SEQ ID NOs: 18-88, 126, 130, 137, 141, 147, 153, 157, 445, 460, 467, and 482-487.

[2937] Embodiment 19. The method of embodiment 1, wherein the polymerase comprises an RNA-dependent DNA polymerase activity.

[2938] Embodiment 20. The method of embodiment 1, wherein the polymerase is a reverse transcriptase.

[2939] Embodiment 21. The method of embodiment 1, wherein the reverse transcriptase is a naturally occurring wild type reverse transcriptase having an amino acid sequence of any one of SEQ ID NOs: 89 or an amino acid sequence having at least 80%, 85%, 90%, 95%, 98%, or 99% sequence identity with any of SEQ ID NOs: 89.

[2940] Embodiment 22. The method of embodiment 1, wherein the reverse transcriptase is a variant reverse transcriptase having an amino acid sequence of any one of SEQ ID NOs: 89-100, 105-122, 128-129, 132, 139, 143, 149, 154, 159, 235, 454, 471, 516, 662, 700, 701-716, 739-741, and 766 or an amino acid sequence having at least 80%, 85%, 90%, 95%, 98%, or 99% sequence identity with any of SEQ ID NOs: 89-100, 105-122, 128-129, 132, 139, 143, 149, 154, 159, 235, 454, 471, 516, 662, 700, 701-716, 739-741, and 766.

[2941] Embodiment 23. The method of embodiment 1, wherein the reverse transcriptase comprises any one of the amino acid sequences of SEQ ID NOs: 89-100, 105-122, 128-129, 132, 139, 143, 149, 154, 159, 235, 454, 471, 516, 662, 700, 701-716, 739-741, and 766.

[2942] Embodiment 24. The method of embodiment 1, wherein the reverse transcriptase comprises an amino acid sequence having at least 80%, 85%, 90%, 95%, 98%, or 99% sequence identity with the amino acid sequence of any one of SEQ ID NOs: 89-100, 105-122, 128-129, 132, 139, 143, 149, 154, 159, 235, 454, 471, 516, 662, 700, 701-716, 739-741, and 766.

[2943] Embodiment 25. The method of embodiment 1, wherein the detectable sequence is an insertion of at least 1, or at least 2, or at least 3, or at least 4, or at least 5, or at least 6, or at least 7, or at least 8, or at least 9, or at least 10, or at least 11, or at least 12, or at least 13, or at least 14, or at least 15, or at least 16, or at least 17, or at least 18, or at least 19, or at least 20, or at least 21, or at least 22, or at least 23, or at least 24, or at least 25, or at least 26, or at least 27, or at least 28, or at least 29, or at least 30, or at least 31, or at least 32, or at least 33, or at least 34, or at least 35, or at least 40, or at least 50, or at least 60, or at least 70, or at least 80, or at least 90, or at least 100 nucleobases.

[2944] Embodiment 26. The method of embodiment 1, wherein the detectable sequence is a deletion of at least 1, or at least 2, or at least 3, or at least 4, or at least 5, or at least 6, or at least 7, or at least 8, or at least 9, or at least 10, or at least 11, or at least 12, or at least 13, or at least 14, or at least 15, or at least 16, or at least 17, or at least 18, or at least 19, or at least 20, or at least 21, or at least 22, or at least 23, or at least 24, or at least 25, or at least 26, or at least 27, or at least 28, or at least 29, or at least 30, or at least 31, or at least 32, or at least 33, or at least 34, or at least 35, or at least 40, or at least 50, or at least 60, or at least 70, or at least 80, or at least 90, or at least 100 nucleobases.

[2945] Embodiment 27. The method of embodiment 1, wherein the detectable sequence is a nucleobase substitution.

[2946] Embodiment 28. The method of embodiment 1, wherein the detectable sequence is a transition mutation.

[2947] Embodiment 29. The method of embodiment 1, wherein the detectable sequence is a transversion mutation.

[2948] Embodiment 30. The method of embodiment 1, wherein the detectable sequence is a single nucleotide substitution selected from the group consisting of: (1) a G to T substitution, (2) a G to A substitution, (3) a G to C substitution, (4) a T to G substitution, (5) a T to A substitution, (6) a T to C substitution, (7) a C to G substitution, (8) a C to T substitution, (9) a C to A substitution, (10) an A to T substitution, (11) an A to G substitution, and (12) an A to C substitution.

[2949] Embodiment 31. The method of embodiment 1, wherein the detectable sequence is a single nucleotide substitution that converts (1) a G:C basepair to a T:A basepair, (2) a G:C basepair to an A:T basepair, (3) a G:C basepair to C:G basepair, (4) a T:A basepair to a G:C basepair, (5) a T:A basepair to an A:T basepair, (6) a T:A basepair to a C:G basepair, (7) a C:G basepair to a G:C basepair, (8) a C:G basepair to a T:A basepair, (9) a C:G basepair to an A:T basepair, (10) an A:T basepair to a T:A basepair, (11) an A:T basepair to a G:C basepair, or (12) an A:T basepair to a C:G basepair.

[2950] Embodiment 32. The method of embodiment 1, wherein the detectable sequence is a barcode sequence.

[2951] Embodiment 33. The method of embodiment 1, wherein step (d) of determining the nucleotide sequence at the on-target and off-target sites comprises (i) fragmenting the target nucleotide sequence to form fragments, (ii) attaching adapter sequences to the ends of the fragments, (iii) PCR amplifying an amplicon using a pair of primers wherein one primer anneals to an adapter sequence attached at one end of the fragments, and another primer that anneals to an adapter sequence inserted by prime editing located within the fragment, and (iv) sequencing the amplicon to determine the location of the edit.

### Group J. PE Methods for Cell Data Recording

[2952] Embodiment 1. A method of recording a cellular event by prime editing, the method comprising: (A) introducing into a cell one or more constructs encoding (i) a prime editor fusion protein comprising an napDNAbp and an RNA-dependent DNA polymerase and (ii) a PEgRNA, wherein the expression of the fusion protein and/or the PEgRNA is induced by the occurrence of a cellular event, and wherein upon expression of the fusion protein and/or the PEgRNA results in prime editing of a target edit site in the genome of the cell to introduce a detectable sequence, and (B) identifying the detectable sequence, thereby identifying the occurrence of the cellular event.

[2953] Embodiment 2. The method of embodiment 1, wherein the prime editing of step (A) simultaneously introduces a new target edit site such that the recording of the cellular event may occur iteratively.

[2954] Embodiment 3. The method of embodiment 1, wherein the PEgRNA comprises an edit template that encodes the detectable sequence.

[2955] Embodiment 4. The method of embodiment 3, wherein the edit template further encodes a new target edit site.

[2956] Embodiment 5. The method of embodiment 1, wherein the detectable sequence is an insertion of at least 1, or at least 2, or at least 3, or at least 4, or at least 5, or at least 6, or at least 7, or at least 8, or at least 9, or at least 10, or at least 11, or at least 12, or at least 13, or at least 14, or at least 15, or at least 16, or at least 17, or at least 18, or at least 19, or at least 20, or at least 21, or at least 22, or at least 23, or at least 24, or at least 25, or at least 26, or at least 27, or at least 28, or at least 29, or at least 30, or at least 31, or at least 32, or at least 33, or at least 34, or at least 35, or at least 40, or at least 50, or at least 60, or at least 70, or at least 80, or at least 90, or at least 100 nucleobases.

[2957] Embodiment 6. The method of embodiment 1, wherein the detectable sequence is a deletion of at least 1, or at least 2, or at least 3, or at least 4, or at least 5, or at least 6, or at least 7, or at least 8, or at least 9, or at least 10, or at least 11, or at least 12, or at least 13, or at least 14, or at least 15, or at least 16, or at least 17, or at least 18, or at least 19, or at least 20, or at least 21, or at least 22, or at least 23, or at least 24, or at least 25, or at least 26, or at least 27, or at least 28, or at least 29, or at least 30, or at least 31, or at least 32, or at least 33, or at least 34, or at least 35, or at least 40, or at least 50, or at least 60, or at least 70, or at least 80, or at least 90, or at least 100 nucleobases.

[2958] Embodiment 7. The method of embodiment 1, wherein the detectable sequence is a nucleobase substitution.

[2959] Embodiment 8. The method of embodiment 1, wherein the detectable sequence is a transition mutation.

[2960] Embodiment 9. The method of embodiment 1, wherein the detectable sequence is a transversion mutation.

[2961] Embodiment 10. The method of embodiment 1, wherein the detectable sequence is a single nucleotide substitution of wherein the single nucleotide substitution is (1) a G to T substitution, (2) a G to A substitution, (3) a G to C substitution, (4) a T to G substitution, (5) a T to A substitution, (6) a T to C substitution, (7) a C to G substitution, (8) a C to T substitution, (9) a C to A substitution, (10) an A to T substitution, (11) an A to G substitution, or (12) an A to C substitution.

[2962] Embodiment 11. The method of embodiment 1, wherein the detectable sequence is a single nucleotide substitution that converts (1) a G:C basepair to a T:A basepair, (2) a G:C basepair to an A:T basepair, (3) a G:C basepair to C:G basepair, (4) a T:A basepair to a G:C basepair, (5) a T:A basepair to an A:T basepair, (6) a T:A basepair to a C:G basepair, (7) a C:G basepair to a G:C basepair, (8) a C:G basepair to a T:A basepair, (9) a C:G basepair to an A:T basepair, (10) an A:T basepair to a T:A basepair, (11) an A:T basepair to a G:C basepair, or (12) an A:T basepair to a C:G basepair.

[2963] Embodiment 12. The method of embodiment 1, wherein the detectable sequence is a barcode sequence.

[2964] Embodiment 13. The method of embodiment 1, wherein the detectable sequence increases in length over time as a result of iterative insertion of the detectable sequence for each occurrence of the cellular event.

[2965] Embodiment 14. The method of embodiment 1, wherein the detecting step comprises sequencing the edited target site, or an amplicon of the edited target site.

[2966] Embodiment 15. The method of embodiment 1, wherein the napDNAbp is Cas9, Cas12e, Cas12d, Cas12a, Cas12b1, Cas13a, Cas12c, or Argonaute, or a variant of Cas9, Cas12e, Cas12d, Cas12a, Cas12b1, Cas13a, Cas12c, or Argonaute.

[2967] Embodiment 16. The method of embodiment 1, wherein the napDNAbp is a Cas9 or variant thereof.

[2968] Embodiment 17. The method of embodiment 1, wherein the napDNAbp is a nuclease active Cas9, a nuclease inactive Cas9 (dCas9), or a Cas9 nickase (nCas9).

[2969] Embodiment 18. The method of embodiment 1, wherein the napDNAbp is Cas9 nickase (nCas9).

[2970] Embodiment 19. The method of embodiment 1, wherein the napDNAbp comprises the amino acid sequence of SEQ ID NO: 18, or an amino acid sequence having at least 80%, 85%, 90%, 95%, 98%, or 99% sequence identity with SEQ ID NO: 18.

[2971] Embodiment 20. The method of embodiment 1, wherein the napDNAbp is SpCas9 wild type or a variant thereof of any one of amino acid sequences SEQ ID NOs: 18-88, 126, 130, 137, 141, 147, 153, 157, 445, 460, 467, and 482-487, or an amino acid sequence having at least 80%, 85%, 90%, 95%, 98%, or 99% sequence identity with any of SEQ ID NOs: 18-88, 126, 130, 137, 141, 147, 153, 157, 445, 460, 467, and 482-487.

[2972] Embodiment 21. The method of embodiment 1, wherein the napDNAbp is an SpCas9 ortholog.

[2973] Embodiment 22. The method of embodiment 1, wherein the napDNAbp is any one of amino acid sequences SEQ ID NOs: 18-88, 126, 130, 137, 141, 147, 153, 157, 445, 460, 467, and 482-487, or an amino acid sequence having at least 80%, 85%, 90%, 95%, 98%, or 99% sequence identity with any of SEQ ID NOs: 18-88, 126, 130, 137, 141, 147, 153, 157, 445, 460, 467, and 482-487.

[2974] Embodiment 23. The method of embodiment 1, wherein the RNA-dependent DNA polymerase is a reverse transcriptase.

[2975] Embodiment 24. The method of embodiment 23, wherein the reverse transcriptase is a naturally occurring wild type reverse transcriptase having an amino acid sequence of any one of SEQ ID NOs: 89 or an amino acid sequence having at least 80%, 85%, 90%, 95%, 98%, or 99% sequence identity with any of SEQ ID NOs: 89.

[2976] Embodiment 25. The method of embodiment 23, wherein the reverse transcriptase is a variant reverse transcriptase having an amino acid sequence of any one of SEQ ID NOs: 89-100, 105-122, 128-129, 132, 139, 143, 149, 154, 159, 235, 454, 471, 516, 662, 700, 701-716, 739-741, and 766 or an amino acid sequence having at least 80%, 85%, 90%, 95%, 98%, or 99% sequence identity with any of SEQ ID NOs: 89-100, 105-122, 128-129, 132, 139, 143, 149, 154, 159, 235, 454, 471, 516, 662, 700, 701-716, 739-741, and 766.

[2977] Embodiment 26. The method of embodiment 1, wherein the fusion protein comprises an amino acid sequence of any one of SEQ ID NOs: 123 and 134 (PE1, PE2), or an amino acid sequence having at least 80%, 85%, 90%, 95%, 98%, or 99% sequence identity with any of SEQ ID NOs:123 and 134 (PE1, PE2).

[2978] Embodiment 27. The method of embodiment 1, wherein the one or more constructs that encode the prime editor fusion protein and/or the PEgRNA further comprises one or more promoters which are inducible when cellular event occurs.

[2979] Embodiment 28. The method of embodiment 1, wherein the cellular event is marked by a stimulus received by the cell.

[2980] Embodiment 29. The method of embodiment 28, wherein the stimulus is a small molecule, a protein, a peptide, an amino acid, a metabolite, an inorganic molecule, an organometallic molecule, an organic molecule, a drug or drug candidate, a sugar, a lipid, a metal, a nucleic acid, a molecule produced during the activation of an endogenous or an exogenous signaling cascade, light, heat, sound, pressure, mechanical stress, shear stress, or a virus or other microorganism, change in pH, or change in oxidation/reduction state.

[2981] Embodiment 30. A cell data recording plasmid for recording a cellular event using prime editing, comprising:

[2982] i. a fusion protein comprising (a) a nucleic acid sequence encoding a nucleic acid programmable DNA binding protein (napDNAbp) and a (b) RNA-dependent DNA polymerase, said fusion protein being operably linked to a first promoter;

[2983] ii. a nucleic acid sequence encoding a prime editor guide RNA (PEgRNA) operably linked to a second promoter, wherein the PEgRNA is complementary to a target sequence; and

[2984] iii. an origin of replication;

[2985] wherein at least one of the promoters is an inducible promoter, and wherein the PEgRNA associates with the napDNAbp under conditions that induce expression of the PEgRNA and expression of the napDNAbp sufficiently to install a detectable sequence at a target edit site.

[2986] Embodiment 31. The cell data recording plasmid of embodiment 30, wherein the inducible promoter is induced by the cellular event.

[2987] Embodiment 32. The cell data recording plasmid of embodiment 30, wherein the cellular event is marked by a stimulus received by the cell.

[2988] Embodiment 33. The cell data recording plasmid of embodiment 32, wherein the stimulus is a small molecule, a protein, a peptide, an amino acid, a metabolite, an inorganic molecule, an organometallic molecule, an organic molecule, a drug or drug candidate, a sugar, a lipid, a metal, a nucleic acid, a molecule produced during the activation of an endogenous or an exogenous signaling cascade, light, heat, sound, pressure, mechanical stress, shear stress, or a virus or other microorganism, change in pH, or change in oxidation/reduction state.

[2989] Embodiment 34. The cell data recording plasmid of embodiment 30, wherein the first and second promoter are the same.

[2990] Embodiment 35. The cell data recording plasmid of embodiment 30, wherein the first and second promoter are different.

[2991] Embodiment 36. The cell data recording plasmid of embodiment 30, wherein the at least one inducible promoter is an anhydrotetracycline-inducible promoter, IPTG-inducible promoter, rhamnose-inducible promoter, or arabinose-inducible promoter.

[2992] Embodiment 37. The cell data recording plasmid of embodiment 30, wherein the first or second promoter is a constitutive promoter.

[2993] Embodiment 38. The cell data recording plasmid of embodiment 37, wherein the constitutive promoter is a Lac promoter, cytomegalovirus (CMV) promoter, a constitutive RNA polymerase III promoter, or a UBC promoter.

[2994] Embodiment 39. The cell data recording plasmid of embodiment 30, wherein the origin of replication comprises a pSC101, pMB1, pBR322, ColE1, or p15A origin of replication sequence.

[2995] Embodiment 40. The cell data recording plasmid of embodiment 30, wherein the PEgRNA comprises an edit template that encodes the detectable sequence.

[2996] Embodiment 41. The cell data recording plasmid of embodiment 40, wherein the edit template further encodes a new target edit site.

[2997] Embodiment 42. The cell data recording plasmid of embodiment 30, wherein the detectable sequence is an insertion of at least 1, or at least 2, or at least 3, or at least 4, or at least 5, or at least 6, or at least 7, or at least 8, or at least 9, or at least 10, or at least 11, or at least 12, or at least 13, or at least 14, or at least 15, or at least 16, or at least 17, or at least 18, or at least 19, or at least 20, or at least 21, or at least 22, or at least 23, or at least 24, or at least 25, or at least 26, or at least 27, or at least 28, or at least 29, or at least 30, or at least 31, or at least 32, or at least 33, or at least 34, or at least 35, or at least 40, or at least 50, or at least 60, or at least 70, or at least 80, or at least 90, or at least 100 nucleobases.

[2998] Embodiment 43. The cell data recording plasmid of embodiment 30, wherein the detectable sequence is a deletion of at least 1, or at least 2, or at least 3, or at least 4, or at least 5, or at least 6, or at least 7, or at least 8, or at least 9, or at least 10, or at least 11, or at least 12, or at least 13, or at least 14, or at least 15, or at least 16, or at least 17, or at least 18, or at least 19, or at least 20, or at least 21, or at least 22, or at least 23, or at least 24, or at least 25, or at least 26, or at least 27, or at least 28, or at least 29, or at least 30, or at least 31, or at least 32, or at least 33, or at least 34, or at least 35, or at least 40, or at least 50, or at least 60, or at least 70, or at least 80, or at least 90, or at least 100 nucleobases.

[2999] Embodiment 44. The cell data recording plasmid of embodiment 30, wherein the detectable sequence is a nucleobase substitution.

[3000] Embodiment 45. The cell data recording plasmid of embodiment 30, wherein the detectable sequence is a transition mutation.

[3001] Embodiment 46. The cell data recording plasmid of embodiment 30, wherein the detectable sequence is a transversion mutation.

[3002] Embodiment 47. The cell data recording plasmid of embodiment 30, wherein the detectable sequence is a single nucleotide substitution of wherein the single nucleotide substitution is (1) a G to T substitution, (2) a G to A substitution, (3) a G to C substitution, (4) a T to G substitution, (5) a T to A substitution, (6) a T to C substitution, (7) a C to G substitution, (8) a C to T substitution, (9) a C to A substitution, (10) an A to T substitution, (11) an A to G substitution, or (12) an A to C substitution.

[3003] Embodiment 48. The cell data recording plasmid of embodiment 30, wherein the detectable sequence is a single nucleotide substitution that converts (1) a G:C basepair to a T:A basepair, (2) a G:C basepair to an A:T basepair, (3) a G:C basepair to C:G basepair, (4) a T:A basepair to a G:C basepair, (5) a T:A basepair to an A:T basepair, (6) a T:A basepair to a C:G basepair, (7) a C:G basepair to a G:C basepair, (8) a C:G basepair to a T:A basepair, (9) a C:G basepair to an A:T basepair, (10) an A:T basepair to a T:A basepair, (11) an A:T basepair to a G:C basepair, or (12) an A:T basepair to a C:G basepair.

[3004] Embodiment 49. The cell data recording plasmid of embodiment 30, wherein the detectable sequence is a barcode sequence.

[3005] Embodiment 50. The cell data recording plasmid of embodiment 30, wherein the detectable sequence increases in length over time as a result of iterative insertion of the detectable sequence for each occurrence of the cellular event.

[3006] Embodiment 51. The cell data recording plasmid of embodiment 30, wherein the detecting step comprises sequencing the edited target site, or an amplicon of the edited target site.

[3007] Embodiment 52. The cell data recording plasmid of embodiment 30, wherein the napDNAbp is Cas9, Cas12e, Cas12d, Cas12a, Cas12b1, Cas13a, Cas12c, or Argonaute, or a variant of Cas9, Cas12e, Cas12d, Cas12a, Cas12b1, Cas13a, Cas12c, or Argonaute.

[3008] Embodiment 53. The cell data recording plasmid of embodiment 30, wherein the napDNAbp is a Cas9 or variant thereof.

[3009] Embodiment 54. The cell data recording plasmid of embodiment 30, wherein the napDNAbp is a nuclease active Cas9, a nuclease inactive Cas9 (dCas9), or a Cas9 nickase (nCas9).

[3010] Embodiment 55. The cell data recording plasmid of embodiment 30, wherein the napDNAbp is Cas9 nickase (nCas9).

[3011] Embodiment 56. The cell data recording plasmid of embodiment 30, wherein the napDNAbp comprises the amino acid sequence of SEQ ID NO: 18, or an amino acid sequence having at least 80%, 85%, 90%, 95%, 98%, or 99% sequence identity with SEQ ID NO: 18.

[3012] Embodiment 57. The cell data recording plasmid of embodiment 30, wherein the napDNAbp is SpCas9 wild type or a variant thereof of any one of amino acid sequences SEQ ID NOs: 18-88, 126, 130, 137, 141, 147, 153, 157, 445, 460, 467, and 482-487, or an amino acid sequence having at least 80%, 85%, 90%, 95%, 98%, or 99% sequence identity with any of SEQ ID NOs: 18-88, 126, 130, 137, 141, 147, 153, 157, 445, 460, 467, and 482-487.

[3013] Embodiment 58. The cell data recording plasmid of embodiment 30, wherein the napDNAbp is an SpCas9 ortholog.

[3014] Embodiment 59. The cell data recording plasmid of embodiment 30, wherein the napDNAbp is any one of amino acid sequences SEQ ID NOs: 18-88, 126, 130, 137, 141, 147, 153, 157, 445, 460, 467, and 482-487, or an amino acid sequence having at least 80%, 85%, 90%, 95%, 98%, or 99% sequence identity with any of SEQ ID NOs: 18-88, 126, 130, 137, 141, 147, 153, 157, 445, 460, 467, and 482-487.

[3015] Embodiment 60. The cell data recording plasmid of embodiment 30, wherein the RNA-dependent DNA polymerase is a reverse transcriptase.

[3016] Embodiment 61. The cell data recording plasmid of embodiment 30, wherein the reverse transcriptase is a naturally occurring wild type reverse transcriptase having an amino acid sequence of any one of SEQ ID NOs: 89 or an amino acid sequence having at least 80%, 85%, 90%, 95%, 98%, or 99% sequence identity with any of SEQ ID NOs: 89.

[3017] Embodiment 62. The cell data recording plasmid of embodiment 30, wherein the reverse transcriptase is a variant reverse transcriptase having an amino acid sequence of any one of SEQ ID NOs: 89-100, 105-122, 128-129, 132, 139, 143, 149, 154, 159, 235, 454, 471, 516, 662, 700, 701-716, 739-741, and 766 or an amino acid sequence having at least 80%, 85%, 90%, 95%, 98%, or 99% sequence identity with any of SEQ ID NOs: 89-100, 105-122, 128-129, 132, 139, 143, 149, 154, 159, 235, 454, 471, 516, 662, 700, 701-716, 739-741, and 766.

[3018] Embodiment 63. The cell data recording plasmid of embodiment 30, wherein the fusion protein comprises an amino acid sequence of any one of SEQ ID NOs: 123 and 134 (PE1, PE2), or an amino acid sequence having at least 80%, 85%, 90%, 95%, 98%, or 99% sequence identity with any of SEQ ID NOs: 123 and 134 (PE1, PE2).

[3019] Embodiment 64. A kit for use in a cell comprising the cell data recorder plasmid of any one of embodiments 30 63.

[3020] Embodiment 65. The kit of embodiment 64, wherein the cell is a prokaryotic cell.

[3021] Embodiment 66. The kit of embodiment 64, wherein the cell is a eukaryotic cell.

[3022] Embodiment 67. A cell comprising the cell data recording plasmid of any one of embodiments 30-63.

[3023] Embodiment 68. The cell of embodiment 67, wherein the cell is a prokaryotic cell.

[3024] Embodiment 69. The cell of embodiment 67, wherein the cell is a eukaryotic cell.

[3025] Embodiment 70. The cell of embodiment 69, wherein the eukaryotic cell is a mammalian cell.

[3026] Embodiment 71. The cell of embodiment 70, wherein the mammalian cell is a human cell.

[3027] Embodiment 72. A method of recording a cellular event by prime editing, the method comprising: (A) introducing into a cell a cell data recording plasmid of any of embodiments 30-63, wherein the fusion protein and/or the PEgRNA are induced by the occurrence of a cellular event, and wherein expression of the fusion protein and/or the PEgRNA results in prime editing of a target edit site in the genome of the cell to introduce a detectable sequence, and (B) identifying the detectable sequence, thereby identifying the occurrence of the cellular event.

[3028] Embodiment 73. The method of embodiment 72, wherein the step of (A) introducing is by transfection or electroporation.

### EQUIVALENTS AND SCOPE

[3029] In the articles such as “a,” “an,” and “the” may mean one or more than one unless indicated to the contrary or otherwise evident from the context. Embodiments or descriptions that include “or” between one or more members of a group are considered satisfied if one, more than one, or all of the group members are present in, employed in, or otherwise relevant to a given product or process unless indicated to the contrary or otherwise evident from the context. The invention includes embodiments in which exactly one member of the group is present in, employed in, or otherwise relevant to a given product or process. The invention includes embodiments in which more than one, or all of the group members are present in, employed in, or otherwise relevant to a given product or process.

[3030] Furthermore, the disclosure encompasses all variations, combinations, and permutations in which one or more limitations, elements, clauses, and descriptive terms from one or more of the listed claims is introduced into another claim. For example, any claim that is dependent on another claim can be modified to include one or more limitations found in any other claims that is dependent on the same base claim. Where elements are presented as lists, e.g., in Markush group format, each subgroup of the elements is also disclosed, and any element(s) can be removed from the group. It should it be understood that, in general, where the invention, or aspects of the invention, is/are referred to as comprising particular elements and/or features, certain embodiments of the disclosure or aspects of the disclosure consist, or consist essentially of, such elements and/or features. For purposes of simplicity, those embodiments have not been specifically set forth in haec verba herein. It is also noted that the terms “comprising” and “containing” are intended to be open and permits the inclusion of additional elements or steps. Where ranges are given, endpoints are included. Furthermore, unless otherwise indicated or otherwise evident from the context and understanding of one of ordinary skill in the art, values that are expressed as ranges can assume any specific value or sub-range within the stated ranges in different embodiments of the invention, to the tenth of the unit of the lower limit of the range, unless the context clearly dictates otherwise.

[3031] This application refers to various issued patents, published patent applications, journal articles, and other publications, all of which are incorporated herein by reference. If there is a conflict between any of the incorporated references and the instant specification, the specification shall control. In addition, any particular embodiment of the present invention that falls within the prior art may be explicitly excluded from any one or more of the embodiments. Because such embodiments are deemed to be known to one of ordinary skill in the art, they may be excluded even if the exclusion is not set forth explicitly herein. Any particular embodiment of the invention can be excluded from any embodiment, for any reason, whether or not related to the existence of prior art.

[3032] Those skilled in the art will recognize or be able to ascertain using no more than routine experimentation many equivalents to the specific embodiments described herein. The scope of the present embodiments described herein is not intended to be limited to the above Description, but rather is as set forth in the appended embodiments. Those of ordinary skill in the art will appreciate that various changes and modifications to this description may be made without departing from the spirit or scope of the present invention, as defined in the following embodiments.

1-51. (canceled)

52. A prime editing guide RNA (PEgRNA) comprising:
a spacer that hybridizes to a first strand of a double-stranded target DNA sequence;
an extension arm that hybridizes to a second strand of the double-stranded target DNA sequence, wherein the second strand comprises a region of complementarity with the first strand of the double-stranded target DNA sequence; and
a gRNA core that associates with a nucleic acid programmable DNA binding protein (napDNAbp).

53. The PEgRNA of claim 52, wherein the spacer, the extension arm, and the gRNA core are in a single RNA molecule.

54. The PEgRNA of claim 52, wherein the extension arm comprises a primer binding site that hybridizes to the second strand of the double-stranded target DNA sequence.

55. The PEgRNA of claim 54, wherein the extension arm further comprises a DNA synthesis template comprising a nucleotide edit as compared to the double-stranded target DNA sequence.

56. The PEgRNA of claim 55, wherein the DNA synthesis template is from 3 nucleotides to 500 nucleotides in length.

57. The PEgRNA of claim 56, wherein the DNA synthesis template comprises a region of homology to the double-stranded target DNA sequence.

58. The PEgRNA of claim 56, wherein the nucleotide edit comprises a nucleotide insertion as compared to the double double-stranded target DNA sequence.

59. The PEgRNA of claim 56, wherein the nucleotide edit comprises a single nucleotide substitution as compared to the double-stranded target DNA sequence.

60. The PEgRNA of claim 56, wherein the nucleotide edit comprises a nucleotide deletion as compared to the double-stranded target DNA sequence.

61. The PEgRNA of claim 56, wherein the nucleotide edit comprises two or more nucleotide insertions, nucleotide substitutions, nucleotide deletions, or a combination of two or more of a nucleotide insertion, a nucleotide substitution, and a nucleotide deletion, as compared to the double stranded target DNA sequence.

62. The PEgRNA of claim 55, wherein the extension arm comprises the DNA synthesis template and the primer binding site in a 5′ to 3′ orientation.

63. The PEgRNA of claim 55, wherein the extension arm comprises the DNA synthesis template and the primer binding site in a 3′ to 5′ orientation.

64. The PEgRNA of claim 55, comprising from 5′ to 3′: the spacer, the gRNA core, the DNA synthesis template, and the primer binding site.

65. The PEgRNA of claim 55, comprising from 5′ to 3′: the DNA synthesis template, the primer binding site, the spacer, and the gRNA core.

66. The PEgRNA of claim 54, wherein the extension arm is flanked by a 5′ fragment of the gRNA core and a 3′ fragment of the gRNA core.

67. The PEgRNA of claim 54, wherein the primer binding site is from 3 nucleotides to 500 nucleotides in length.

68. The PEgRNA of claim 57, wherein the DNA synthesis template comprises from 3 nucleotides to 500 nucleotides that are homologous to the double-stranded target DNA sequence.

69. The PEgRNA of claim 52 comprising a chemically modified nucleobase.

70. The PEgRNA of claim 52, wherein the PEgRNA is a chimeric PEgRNA and comprises a DNA nucleotide in the extension arm.

71-72. (canceled)

73. The PEgRNA of claim 56, wherein the DNA synthesis template is from 8 nucleotides to 31 nucleotides in length.

74. The PEgRNA of claim 56, wherein the DNA synthesis template is from 10 nucleotides to 16 nucleotides in length.

75. The PEgRNA of claim 56, wherein the DNA synthesis template is from 12 nucleotides to 17 nucleotides in length.

76. The PEgRNA of claim 56, wherein the nucleotide edit comprises a single nucleotide substitution, a single nucleotide insertion, or a single nucleotide deletion, as compared to the double-stranded target DNA sequence.

77. The PEgRNA of claim 67, wherein the primer binding site is from 8 nucleotides to 15 nucleotides in length.

78. The PEgRNA of claim 77, wherein the primer binding site is from (a) 8 nucleotides to 11 nucleotides in length, and contains greater than about 60% GC content, (b) 12 nucleotides to 13 nucleotides in length, and comprises about 40-60% GC content, or (c) 14 nucleotides to 15 nucleotides in length, and contains less than about 40% GC content.

79. The PEgRNA of claim 55, wherein the spacer is complementary to a target site in the first strand of the double-stranded target DNA sequence, wherein the target site is directly adjacent to a protospacer adjacent motif (PAM) in the double-stranded target DNA sequence.

80. The PEgRNA of claim 79, wherein the nucleotide edit is at a position corresponding to a nucleotide within the PAM in the double-stranded target DNA sequence.

81. The PEgRNA of claim 55, wherein the nucleotide edit corrects a disease-associated gene.

82. The PEgRNA of claim 81, wherein the disease-associated gene is associated with a monogenetic disorder.

The application's sequence listing, which the Patent Office published only in electronic form, follows.

SEQUENCE LISTING (3872 sequences)

SEQ ID NO: 1 - protein, 12 aa, Artificial Sequence
  Synthetic
FLNCCPGCCMEP

SEQ ID NO: 2 - protein, 8 aa, Artificial Sequence
  Synthetic
DYKDDDDK

SEQ ID NO: 3 - protein, 14 aa, Artificial Sequence
  Synthetic
GKPIPNPLLGLDST

SEQ ID NO: 4 - protein, 19 aa, Artificial Sequence
  Synthetic
EELLSKNYHLENEVARLKK

SEQ ID NO: 5 - protein, 9 aa, Artificial Sequence
  Synthetic
YPYDVPDYA

SEQ ID NO: 6 - protein, 10 aa, Artificial Sequence
  Synthetic
EQKLISEEDL

SEQ ID NO: 7 - protein, 380 aa, Homo sapiens
MGIQGLAKLIADVAPSAIRENDIKSYFGRKVAIDASMSIYQFLIAVRQGGDVLQNEEGETTSHLMGMFYRTIRMMENGIKPVYVFDGKPPQLKSGELAKRSERRAEAEKQLQQAQAAGAEQEVEKFTKRLVKVTKQHNDECKHLLSLMGIPYLDAPSEAEASCAALVKAGKVYAAATEDMDCLTFGSPVLMRHLTASEAKKLPIQEFHLSRILQELGLNQEQFVDLCILLGSDYCESIRGIGPKRAVDLIQKHKSIEEIVRRLDPNKYPVPENWLHKEAHQLFLEPEVLDPESVELKWSEPNEEELIKFMCGEKQFSEERIRSGVKRLSKSRQGSTQGRLDDFFKVTGSLSSAKRKEPEPKGSTKKKAKTGAAGKFKRGK

SEQ ID NO: 8 - protein, 413 aa, Artificial Sequence
  Synthetic
CLAEGTRIFDPVTGTTHRIEDVVDGRKPIHVVAAAKDGTLLARPVVSWFDQGTRDVIGLRIAGGAIVWATPDHKVLTEYGWRAAGELRKGDRVAGPGGSGNSLALSLTADQMVSALLDAEPPILYSEYDPTSPFSEASMMGLLTNLADRELVHMINWAKRVPGFVDLTLHDQAHLLECAWLEILMIGLVWRSMEHPGKLLFAPNLLLDRNQGKCVEGMVEIFDMLLATSSRFRMMNLQGEEFVCLKSIILLNSGVYTFLSSTLKSLEEKDHIHRALDKITDTLIHLMAKAGLTLQQQHQRLAQLLLILSHIRHMSNKGMEHLYSMKYKNVVPLYDLLLEMLDAHRLHAGGSGASRVQAFADALDDKFLHDMLAEELRYSVIREVLPTRRARTFDLEVEELHTLVAEGVVVHNC

SEQ ID NO: 9 - protein, 413 aa, Artificial Sequence
  Synthetic
CLAEGTRIFDPVTGTTHRIEDVVDGRKPIHVVAVAKDGTLLARPVVSWFDQGTRDVIGLRIAGGAIVWATPDHKVLTEYGWRAAGELRKGDRVAGPGGSGNSLALSLTADQMVSALLDAEPPILYSEYDPTSPFSEASMMGLLTNLADRELVHMINWAKRVPGFVDLTLHDQAHLLECAWLEILMIGLVWRSMEHPGKLLFAPNLLLDRNQGKCVEGMVEIFDMLLATSSRFRMMNLQGEEFVCLKSIILLNSGVYTFLSSTLKSLEEKDHIHRALDKITDTLIHLMAKAGLTLQQQHQRLAQLLLILSHIRHMSNKGMEHLYSMKYTNVVPLYDLLLEMLDAHRLHAGGSGASRVQAFADALDDKFLHDMLAEELRYSVIREVLPTRRARTFDLEVEELHTLVAEGVVVHNC

SEQ ID NO: 10 - protein, 413 aa, Artificial Sequence
  Synthetic
CLAEGTRIFDPVTGTTHRIEDVVDGRKPIHVVAAAKDGTLLARPVVSWFDQGTRDVIGLRIAGGATVWATPDHKVLTEYGWRAAGELRKGDRVAGPGGSGNSLALSLTADQMVSALLDAEPPIPYSEYDPTSPFSEASMMGLLTNLADRELVHMINWAKRVPGFVDLTLHDQAHLLECAWLEILMIGLVWRSMEHPGKLLFAPNLLLDRNQGKCVEGMVEIFDMLLATSSRFRMMNLQGEEFVCLKSIILLNSGVYTFLSSTLKSLEEKDHIHRALDKITDTLIHLMAKAGLTLQQQHQRLAQLLLILSHIRHMSNKGMEHLYSMKYKNVVPLYDLLLEMLDAHRLHAGGSGASRVQAFADALDDKFLHDMLAEGLRYSVIREVLPTRRARTFDLEVEELHTLVAEGVVVHNC

SEQ ID NO: 11 - protein, 413 aa, Artificial Sequence
  Synthetic
CLAEGTRIFDPVTGTTHRIEDVVDGRKPIHVVAAAKDGTLLARPVVSWFDQGTRDVIGLRIAGGATVWATPDHKVLTEYGWRAAGELRKGDRVAGPGGSGNSLALSLTADQMVSALLDAEPPILYSEYDPTSPFSEASMMGLLTNLADRELVHMINWAKRVPGFVDLTLHDQAHLLECAWLEILMIGLVWRSMEHPGKLLFAPNLLLDRNQGKCVEGMVEIFDMLLATSSRFRMMNLQGEEFVCLKSIILLNSGVYTFLSSTLKSLEEKDHIHRALDKITDTLIHLMAKAGLTLQQQHQRLAQLLLILSHIRHMSNKGMEHLYSMKYKNVVPLYDLLLEMLDAHRLHAGGSGASRVQAFADALDDKFLHDMLAEELRYSVIREVLPTRRARTFDLEVEELHTLVAEGVVVHNC

SEQ ID NO: 12 - protein, 413 aa, Artificial Sequence
  Synthetic
CLAEGTRIFDPVTGTTHRIEDVVDGRKPIHVVAAAKDGTLLARPVVSWFDQGTRDVIGLRIAGGATVWATPDHKVLTEYGWRAAGELRKGDRVAGPGGSGNSLALSLTADQMVSALLDAEPPIPYSEYDPTSPFSEASMMGLLTNLADRELVHMINWAKRVPGFVDLTLHDQAHLLECAWLEILMIGLVWRSMEHPGKLLFAPNLLLDRNQGKCVEGMVEIFDMLLATSSRFRMMNLQGEEFVCLKSIILLNSGVYTFLSSTLKSLEEKDHIHRALDKITDTLIHLMAKAGLTLQQQHQRLAQLLLILSHIRHMSNKGMEHLYSMKYKNVVPLYDLLLEMLDAHRLHAGGSGASRVQAFADALDDKFLHDMLAEELRYSVIREVLPTRRARTFDLEVEELHTLVAEGVVVHNC

SEQ ID NO: 13 - protein, 413 aa, Artificial Sequence
  Synthetic
CLAEGTRIFDPVTGTTHRIEDVVDGRKPIHVVAAAKDGTLLARPVVSWFDQGTRDVIGLRIAGGATVWATPDHKVLTEYGWRAAGELRKGDRVAGPGGSGNSLALSLTADQMVSALLDAEPPILYSEYNPTSPFSEASMMGLLTNLADRELVHMINWAKRVPGFVDLTLHDQAHLLERAWLEILMIGLVWRSMEHPGKLLFAPNLLLDRNQGKCVEGMVEIFDMLLATSSRFRMMNLQGEEFVCLKSIILLNSGVYTFLSSTLKSLEEKDHIHRALDKITDTLIHLMAKAGLTLQQQHQRLAQLLLILSHIRHMSNKGMEHLYSMKYKNVVPLYDLLLEMLDAHRLHAGGSGASRVQAFADALDDKFLHDMLAEGLRYSVIREVLPTRRARTFDLEVEELHTLVAEGVVVHNC

SEQ ID NO: 14 - protein, 413 aa, Artificial Sequence
  Synthetic
CLAEGTRIFDPVTGTTHRIEDVVDGRKPIHVVAAAKDGTLLARPVVSWFDQGTRDVIGLRIAGGAIVWATPDHKVLTEYGWRAAGELRKGDRVAGPGGSGNSLALSLTADQMVSALLDAEPPILYSEYDPTSPFSEASMMGLLTNLADRELVHMINWAKRVPGFVDLTLHDQAHLLERAWLEILMIGLVWRSMEHPGKLLFAPNLLLDRNQGKCVEGMVEIFDMLLATSSRFRMMNLQGEEFVCLKSIILLNSGVYTFLSSTLKSLEEKDHIHRALDKITDTLIHLMAKAGLTLQQQHQRLAQLLLILSHIRHMSNKGMEHLYSMKYKNVVPLYDLLLEMLDAHRLHAGGSGASRVQAFADALDDKFLHDMLAEGLRYSVIREVLPTRRARTFDLEVEELHTLVAEGVVVHNC

SEQ ID NO: 15 - protein, 413 aa, Artificial Sequence
  Synthetic
CLAEGTRIFDPVTGTTHRIEDVVDGRKPIHVVAVAKDGTLLARPVVSWFDQGTRDVIGLRIAGGATVWATPDHKVLTEYGWRAAGELRKGDRVAGPGGSGNSLALSLTADQMVSALLDAEPPILYSEYDPTSPFSEASMMGLLTNLADRELVHMINWAKRVPGFVDLTLHDQAHLLERAWLEILMIGLVWRSMEHPGKLLFAPNLLLDRNQGKCVEGMVEIFDMLLATSSRFRMMNLQGEEFVCLKSIILLNSGVYTFLSSTLKSLEEKDHIHRALDKITDTLIHLMAKAGLTLQQQHQRLAQLLLILSHIRHMSNKGMEHLYSMKYKNVVPLYDLLLEMLDAHRLHAGGSGASRVQAFADALDDKFLHDMLAEELRYSVIREVLPTRRARTFDLEVEELHTLVAEGVVVHNC

SEQ ID NO: 16 - protein, 7 aa, Artificial Sequence
  Synthetic
PKKKRKV

SEQ ID NO: 17 - protein, 30 aa, Artificial Sequence
  Synthetic
MDSLLMNRRKFLYQFKNVRWAKGRRETYLC

SEQ ID NO: 18 - protein, 1368 aa, Streptococcus pyogenes [sequence omitted]

SEQ ID NO: 19 - DNA, 4104 bp, Streptococcus pyogenes
atggataaaaaatatagcattggcctggatattggcaccaacagcgtgggctgggcggtgattaccgatgaatataaagtgccgagcaaaaaatttaaagtgctgggcaacaccgatcgccatagcattaaaaaaaacctgattggcgcgctgctgtttgatagcggcgaaaccgcggaagcgacccgcctgaaacgcaccgcgcgccgccgctatacccgccgcaaaaaccgcatttgctatctgcaggaaatttttagcaacgaaatggcgaaagtggatgatagcttttttcatcgcctggaagaaagctttctggtggaagaagataaaaaacatgaacgccatccgatttttggcaacattgtggatgaagtggcgtatcatgaaaaatatccgaccatttatcatctgcgcaaaaaactggtggatagcaccgataaagcggatctgcgcctgatttatctggcgctggcgcatatgattaaatttcgcggccattttctgattgaaggcgatctgaacccggataacagcgatgtggataaactgtttattcagctggtgcagacctataaccagctgtttgaagaaaacccgattaacgcgagcggcgtggatgcgaaagcgattctgagcgcgcgcctgagcaaaagccgccgcctggaaaacctgattgcgcagctgccgggcgaaaaaaaaaacggcctgtttggcaacctgattgcgctgagcctgggcctgaccccgaactttaaaagcaactttgatctggcggaagatgcgaaactgcagctgagcaaagatacctatgatgatgatctggataacctgctggcgcagattggcgatcagtatgcggatctgtttctggcggcgaaaaacctgagcgatgcgattctgctgagcgatattctgcgcgtgaacaccgaaattaccaaagcgccgctgagcgcgagcatgattaaacgctatgatgaacatcatcaggatctgaccctgctgaaagcgctggtgcgccagcagctgccggaaaaatataaagaaattttttttgatcagagcaaaaacggctatgcgggctatattgatggcggcgcgagccaggaagaattttataaatttattaaaccgattctggaaaaaatggatggcaccgaagaactgctggtgaaactgaaccgcgaagatctgctgcgcaaacagcgcacctttgataacggcagcattccgcatcagattcatctgggcgaactgcatgcgattctgcgccgccaggaagatttttatccgtttctgaaagataaccgcgaaaaaattgaaaaaattctgacctttcgcattccgtattatgtgggcccgctggcgcgcggcaacagccgctttgcgtggatgacccgcaaaagcgaagaaaccattaccccgtggaactttgaagaagtggtggataaaggcgcgagcgcgcagagctttattgaacgcatgaccaactttgataaaaacctgccgaacgaaaaagtgctgccgaaacatagcctgctgtatgaatattttaccgtgtataacgaactgaccaaagtgaaatatgtgaccgaaggcatgcgcaaaccggcgtttctgagcggcgaacagaaaaaagcgattgtggatctgctgtttaaaaccaaccgcaaagtgaccgtgaaacagctgaaagaagattattttaaaaaaattgaatgctttgatagcgtggaaattagcggcgtggaagatcgctttaacgcgagcctgggcacctatcatgatctgctgaaaattattaaagataaagattttctggataacgaagaaaacgaagatattctggaagatattgtgctgaccctgaccctgtttgaagatcgcgaaatgattgaagaacgcctgaaaacctatgcgcatctgtttgatgataaagtgatgaaacagctgaaacgccgccgctataccggctggggccgcctgagccgcaaactgattaacggcattcgcgataaacagagcggcaaaaccattctggattttctgaaaagcgatggctttgcgaaccgcaactttatgcagctgattcatgatgatagcctgacctttaaagaagatattcagaaagcgcaggtgagcggccagggcgatagcctgcatgaacatattgcgaacctggcgggcagcccggcgattaaaaaaggcattctgcagaccgtgaaagtggtggatgaactggtgaaagtgatgggccgccataaaccggaaaacattgtgattgaaatggcgcgcgaaaaccagaccacccagaaaggccagaaaaacagccgcgaacgcatgaaacgcattgaagaaggcattaaagaactgggcagccagattctgaaagaacatccggtggaaaacacccagctgcagaacgaaaaactgtatctgtattatctgcagaacggccgcgatatgtatgtggatcaggaactggatattaaccgcctgagcgattatgatgtggatcatattgtgccgcagagctttctgaaagatgatagcattgataacaaagtgctgacccgcagcgataaaaaccgcggcaaaagcgataacgtgccgagcgaagaagtggtgaaaaaaatgaaaaactattggcgccagctgctgaacgcgaaactgattacccagcgcaaatttgataacctgaccaaagcggaacgcggcggcctgagcgaactggataaagcgggctttattaaacgccagctggtggaaacccgccagattaccaaacatgtggcgcagattctggatagccgcatgaacaccaaatatgatgaaaacgataaactgattcgcgaagtgaaagtgattaccctgaaaagcaaactggtgagcgattttcgcaaagattttcagttttataaagtgcgcgaaattaacaactatcatcatgcgcatgatgcgtatctgaacgcggtggtgggcaccgcgctgattaaaaaatatccgaaactggaaagcgaatttgtgtatggcgattataaagtgtatgatgtgcgcaaaatgattgcgaaaagcgaacaggaaattggcaaagcgaccgcgaaatattttttttatagcaacattatgaacttttttaaaaccgaaattaccctggcgaacggcgaaattcgcaaacgcccgctgattgaaaccaacggcgaaaccggcgaaattgtgtgggataaaggccgcgattttgcgaccgtgcgcaaagtgctgagcatgccgcaggtgaacattgtgaaaaaaaccgaagtgcagaccggcggctttagcaaagaaagcattctgccgaaacgcaacagcgataaactgattgcgcgcaaaaaagattgggatccgaaaaaatatggcggctttgatagcccgaccgtggcgtatagcgtgctggtggtggcgaaagtggaaaaaggcaaaagcaaaaaactgaaaagcgtgaaagaactgctgggcattaccattatggaacgcagcagctttgaaaaaaacccgattgattttctggaagcgaaaggctataaagaagtgaaaaaagatctgattattaaactgccgaaatatagcctgtttgaactggaaaacggccgcaaacgcatgctggcgagcgcgggcgaactgcagaaaggcaacgaactggcgctgccgagcaaatatgtgaactttctgtatctggcgagccattatgaaaaactgaaaggcagcccggaagataacgaacagaaacagctgtttgtggaacagcataaacattatctggatgaaattattgaacagattagcgaatttagcaaacgcgtgattctggcggatgcgaacctggataaagtgctgagcgcgtataacaaacatcgcgataaaccgattcgcgaacaggcggaaaacattattcatctgtttaccctgaccaacctgggcgcgccggcggcgtttaaatattttgataccaccattgatcgcaaacgctataccagcaccaaagaagtgctggatgcgaccctgattcatcagagcattaccggcctgtatgaaacccgcattgatctgagccagctgggcggcgat

SEQ ID NO: 20 - DNA, 4104 bp, Streptococcus pyogenes
atggataagaaatactcaataggcttagatatcggcacaaatagcgtcggatgggcggtgatcactgatgattataaggttccgtctaaaaagttcaaggttctgggaaatacagaccgccacagtatcaaaaaaaatcttataggggctcttttatttggcagtggagagacagcggaagcgactcgtctcaaacggacagctcgtagaaggtatacacgtcggaagaatcgtatttgttatctacaggagattttttcaaatgagatggcgaaagtagatgatagtttctttcatcgacttgaagagtcttttttggtggaagaagacaagaagcatgaacgtcatcctatttttggaaatatagtagatgaagttgcttatcatgagaaatatccaactatctatcatctgcgaaaaaaattggcagattctactgataaagcggatttgcgcttaatctatttggccttagcgcatatgattaagtttcgtggtcattttttgattgagggagatttaaatcctgataatagtgatgtggacaaactatttatccagttggtacaaatctacaatcaattatttgaagaaaaccctattaacgcaagtagagtagatgctaaagcgattctttctgcacgattgagtaaatcaagacgattagaaaatctcattgctcagctccccggtgagaagagaaatggcttgtttgggaatctcattgctttgtcattgggattgacccctaattttaaatcaaattttgatttggcagaagatgctaaattacagctttcaaaagatacttacgatgatgatttagataatttattggcgcaaattggagatcaatatgctgatttgtttttggcagctaagaatttatcagatgctattttactttcagatatcctaagagtaaatagtgaaataactaaggctcccctatcagcttcaatgattaagcgctacgatgaacatcatcaagacttgactcttttaaaagctttagttcgacaacaacttccagaaaagtataaagaaatcttttttgatcaatcaaaaaacggatatgcaggttatattgatgggggagctagccaagaagaattttataaatttatcaaaccaattttagaaaaaatggatggtactgaggaattattggtgaaactaaatcgtgaagatttgctgcgcaagcaacggacctttgacaacggctctattccccatcaaattcacttgggtgagctgcatgctattttgagaagacaagaagacttttatccatttttaaaagacaatcgtgagaagattgaaaaaatcttgacttttcgaattccttattatgttggtccattggcgcgtggcaatagtcgttttgcatggatgactcggaagtctgaagaaacaattaccccatggaattttgaagaagttgtcgataaaggtgcttcagctcaatcatttattgaacgcatgacaaactttgataaaaatcttccaaatgaaaaagtactaccaaaacatagtttgctttatgagtattttacggtttataacgaattgacaaaggtcaaatatgttactgagggaatgcgaaaaccagcatttctttcaggtgaacagaagaaagccattgttgatttactcttcaaaacaaatcgaaaagtaaccgttaagcaattaaaagaagattatttcaaaaaaatagaatgttttgatagtgttgaaatttcaggagttgaagatagatttaatgcttcattaggcgcctaccatgatttgctaaaaattattaaagataaagattttttggataatgaagaaaatgaagatatcttagaggatattgttttaacattgaccttatttgaagatagggggatgattgaggaaagacttaaaacatatgctcacctctttgatgataaggtgatgaaacagcttaaacgtcgccgttatactggttggggacgtttgtctcgaaaattgattaatggtattagggataagcaatctggcaaaacaatattagattttttgaaatcagatggttttgccaatcgcaattttatgcagctgatccatgatgatagtttgacatttaaagaagatattcaaaaagcacaggtgtctggacaaggccatagtttacatgaacagattgctaacttagctggcagtcctgctattaaaaaaggtattttacagactgtaaaaattgttgatgaactggtcaaagtaatggggcataagccagaaaatatcgttattgaaatggcacgtgaaaatcagacaactcaaaagggccagaaaaattcgcgagagcgtatgaaacgaatcgaagaaggtatcaaagaattaggaagtcagattcttaaagagcatcctgttgaaaatactcaattgcaaaatgaaaagctctatctctattatctacaaaatggaagagacatgtatgtggaccaagaattagatattaatcgtttaagtgattatgatgtcgatcacattgttccacaaagtttcattaaagacgattcaatagacaataaggtactaacgcgttctgataaaaatcgtggtaaatcggataacgttccaagtgaagaagtagtcaaaaagatgaaaaactattggagacaacttctaaacgccaagttaatcactcaacgtaagtttgataatttaacgaaagctgaacgtggaggtttgagtgaacttgataaagctggttttatcaaacgccaattggttgaaactcgccaaatcactaagcatgtggcacaaattttggatagtcgcatgaatactaaatacgatgaaaatgataaacttattcgagaggttaaagtgattaccttaaaatctaaattagtttctgacttccgaaaagatttccaattctataaagtacgtgagattaacaattaccatcatgcccatgatgcgtatctaaatgccgtcgttggaactgctttgattaagaaatatccaaaacttgaatcggagtttgtctatggtgattataaagtttatgatgttcgtaaaatgattgctaagtctgagcaagaaataggcaaagcaaccgcaaaatatttcttttactctaatatcatgaacttcttcaaaacagaaattacacttgcaaatggagagattcgcaaacgccctctaatcgaaactaatggggaaactggagaaattgtctgggataaagggcgagattttgccacagtgcgcaaagtattgtccatgccccaagtcaatattgtcaagaaaacagaagtacagacaggcggattctccaaggagtcaattttaccaaaaagaaattcggacaagcttattgctcgtaaaaaagactgggatccaaaaaaatatggtggttttgatagtccaacggtagcttattcagtcctagtggttgctaaggtggaaaaagggaaatcgaagaagttaaaatccgttaaagagttactagggatcacaattatggaaagaagttcctttgaaaaaaatccgattgactttttagaagctaaaggatataaggaagttaaaaaagacttaatcattaaactacctaaatatagtctttttgagttagaaaacggtcgtaaacggatgctggctagtgccggagaattacaaaaaggaaatgagctggctctgccaagcaaatatgtgaattttttatatttagctagtcattatgaaaagttgaagggtagtccagaagataacgaacaaaaacaattgtttgtggagcagcataagcattatttagatgagattattgagcaaatcagtgaattttctaagcgtgttattttagcagatgccaatttagataaagttcttagtgcatataacaaacatagagacaaaccaatacgtgaacaagcagaaaatattattcatttatttacgttgacgaatcttggagctcccgctgcttttaaatattttgatacaacaattgatcgtaaacgatatacgtctacaaaagaagttttagatgccactcttatccatcaatccatcactggtctttatgaaacacgcattgatttgagtcagctaggaggtgactga

SEQ ID NO: 21 - protein, 1367 aa, Streptococcus pyogenes
MDKKYSIGLDIGTNSVGWAVITDDYKVPSKKFKVLGNTDRHSIKKNLIGALLFGSGETAEATRLKRTARRRYTRRKNRICYLQEIFSNEMAKVDDSFFHRLEESFLVEEDKKHERHPIFGNIVDEVAYHEKYPTIYHLRKKLADSTDKADLRLIYLALAHMIKFRGHFLIEGDLNPDNSDVDKLFIQLVQIYNQLFEENPINASRVDAKAILSARLSKSRRLENLIAQLPGEKRNGLFGNLIALSLGLTPNFKSNFDLAEDAKLQLSKDTYDDDLDNLLAQIGDQYADLFLAAKNLSDAILLSDILRVNSEITKAPLSASMIKRYDEHHQDLTLLKALVRQQLPEKYKEIFFDQSKNGYAGYIDGGASQEEFYKFIKPILEKMDGTEELLVKLNREDLLRKQRTFDNGSIPHQIHLGELHAILRRQEDFYPFLKDNREKIEKILTFRIPYYVGPLARGNSRFAWMTRKSEETITPWNFEEVVDKGASAQSFIERMTNFDKNLPNEKVLPKHSLLYEYFTVYNELTKVKYVTEGMRKPAFLSGEQKKAIVDLLFKTNRKVTVKQLKEDYFKKIECFDSVEISGVEDRFNASLGAYHDLLKIIKDKDFLDNEENEDILEDIVLTLTLFEDRGMIEERLKTYAHLFDDKVMKQLKRRRYTGWGRLSRKLINGIRDKQSGKTILDFLKSDGFANRNFMQLIHDDSLTFKEDIQKAQVSGQGHSLHEQIANLAGSPAIKKGILQTVKIVDELVKVMGHKPENIVIEMARENQTTQKGQKNSRERMKRIEEGIKELGSQILKEHPVENTQLQNEKLYLYYLQNGRDMYVDQELDINRLSDYDVDHIVPQSFIKDDSIDNKVLTRSDKNRGKSDNVPSEEVVKKMKNYWRQLLNAKLITQRKFDNLTKAERGGLSELDKAGFIKRQLVETRQITKHVAQILDSRMNTKYDENDKLIREVKVITLKSKLVSDFRKDFQFYKVREINNYHHAHDAYLNAVVGTALIKKYPKLESEFVYGDYKVYDVRKMIAKSEQEIGKATAKYFFYSNIMNFFKTEITLANGEIRKRPLIETNGETGEIVWDKGRDFATVRKVLSMPQVNIVKKTEVQTGGFSKESILPKRNSDKLIARKKDWDPKKYGGFDSPTVAYSVLVVAKVEKGKSKKLKSVKELLGITIMERSSFEKNPIDFLEAKGYKEVKKDLIIKLPKYSLFELENGRKRMLASAGELQKGNELALPSKYVNFLYLASHYEKLKGSPEDNEQKQLFVEQHKHYLDEIIEQISEFSKRVILADANLDKVLSAYNKHRDKPIREQAENIIHLFTLTNLGAPAAFKYFDTTIDRKRYTSTKEVLDATLIHQSITGLYETRIDLSQLGGD

SEQ ID NO: 22 - DNA, 4212 bp, Streptococcus pyogenes
atggataaaaagtattctattggtttagacatcggcactaattccgttggatgggctgtcataaccgatgaatacaaagtaccttcaaagaaatttaaggtgttggggaacacagaccgtcattcgattaaaaagaatcttatcggtgccctcctattcgatagtggcgaaacggcagaggcgactcgcctgaaacgaaccgctcggagaaggtatacacgtcgcaagaaccgaatatgttacttacaagaaatttttagcaatgagatggccaaagttgacgattctttctttcaccgtttggaagagtccttccttgtcgaagaggacaagaaacatgaacggcaccccatctttggaaacatagtagatgaggtggcatatcatgaaaagtacccaacgatttatcacctcagaaaaaagctagttgactcaactgataaagcggacctgaggttaatctacttggctcttgcccatatgataaagttccgtgggcactttctcattgagggtgatctaaatccggacaactcggatgtcgacaaactgttcatccagttagtacaaacctataatcagttgtttgaagagaaccctataaatgcaagtggcgtggatgcgaaggctattcttagcgcccgcctctctaaatcccgacggctagaaaacctgatcgcacaattacccggagagaagaaaaatgggttgttcggtaaccttatagcgctctcactaggcctgacaccaaattttaagtcgaacttcgacttagctgaagatgccaaattgcagcttagtaaggacacgtacgatgacgatctcgacaatctactggcacaaattggagatcagtatgcggacttatttttggctgccaaaaaccttagcgatgcaatcctcctatctgacatactgagagttaatactgagattaccaaggcgccgttatccgcttcaatgatcaaaaggtacgatgaacatcaccaagacttgacacttctcaaggccctagtccgtcagcaactgcctgagaaatataaggaaatattctttgatcagtcgaaaaacgggtacgcaggttatattgacggcggagcgagtcaagaggaattctacaagtttatcaaacccatattagagaagatggatgggacggaagagttgcttgtaaaactcaatcgcgaagatctactgcgaaagcagcggactttcgacaacggtagcattccacatcaaatccacttaggcgaattgcatgctatacttagaaggcaggaggatttttatccgttcctcaaagacaatcgtgaaaagattgagaaaatcctaacctttcgcataccttactatgtgggacccctggcccgagggaactctcggttcgcatggatgacaagaaagtccgaagaaacgattactccatggaattttgaggaagttgtcgataaaggtgcgtcagctcaatcgttcatcgagaggatgaccaactttgacaagaatttaccgaacgaaaaagtattgcctaagcacagtttactttacgagtatttcacagtgtacaatgaactcacgaaagttaagtatgtcactgagggcatgcgtaaacccgcctttctaagcggagaacagaagaaagcaatagtagatctgttattcaagaccaaccgcaaagtgacagttaagcaattgaaagaggactactttaagaaaattgaatgcttcgattctgtcgagatctccggggtagaagatcgatttaatgcgtcacttggtacgtatcatgacctcctaaagataattaaagataaggacttcctggataacgaagagaatgaagatatcttagaagatatagtgttgactcttaccctctttgaagatcgggaaatgattgaggaaagactaaaaacatacgctcacctgttcgacgataaggttatgaaacagttaaagaggcgtcgctatacgggctggggacgattgtcgcggaaacttatcaacgggataagagacaagcaaagtggtaaaactattctcgattttctaaagagcgacggcttcgccaataggaactttatgcagctgatccatgatgactctttaaccttcaaagaggatatacaaaaggcacaggtttccggacaaggggactcattgcacgaacatattgcgaatcttgctggttcgccagccatcaaaaagggcatactccagacagtcaaagtagtggatgagctagttaaggtcatgggacgtcacaaaccggaaaacattgtaatcgagatggcacgcgaaaatcaaacgactcagaaggggcaaaaaaacagtcgagagcggatgaagagaatagaagagggtattaaagaactgggcagccagatcttaaaggagcatcctgtggaaaatacccaattgcagaacgagaaactttacctctattacctacaaaatggaagggacatgtatgttgatcaggaactggacataaaccgtttatctgattacgacgtcgatcacattgtaccccaatcctttttgaaggacgattcaatcgacaataaagtgcttacacgctcggataagaaccgagggaaaagtgacaatgttccaagcgaggaagtcgtaaagaaaatgaagaactattggcggcagctcctaaatgcgaaactgataacgcaaagaaagttcgataacttaactaaagctgagaggggtggcttgtctgaacttgacaaggccggatttattaaacgtcagctcgtggaaacccgccaaatcacaaagcatgttgcacagatactagattcccgaatgaatacgaaatacgacgagaacgataagctgattcgggaagtcaaagtaatcactttaaagtcaaaattggtgtcggacttcagaaaggattttcaattctataaagttagggagataaataactaccaccatgcgcacgacgcttatcttaatgccgtcgtagggaccgcactcattaagaaatacccgaagctagaaagtgagtttgtgtatggtgattacaaagtttatgacgtccgtaagatgatcgcgaaaagcgaacaggagataggcaaggctacagccaaatacttcttttattctaacattatgaatttctttaagacggaaatcactctggcaaacggagagatacgcaaacgacctttaattgaaaccaatggggagacaggtgaaatcgtatgggataagggccgggacttcgcgacggtgagaaaagttttgtccatgccccaagtcaacatagtaaagaaaactgaggtgcagaccggagggttttcaaaggaatcgattcttccaaaaaggaatagtgataagctcatcgctcgtaaaaaggactgggacccgaaaaagtacggtggcttcgatagccctacagttgcctattctgtcctagtagtggcaaaagttgagaagggaaaatccaagaaactgaagtcagtcaaagaattattggggataacgattatggagcgctcgtcttttgaaaagaaccccatcgacttccttgaggcgaaaggttacaaggaagtaaaaaaggatctcataattaaactaccaaagtatagtctgtttgagttagaaaatggccgaaaacggatgttggctagcgccggagagcttcaaaaggggaacgaactcgcactaccgtctaaatacgtgaatttcctgtatttagcgtcccattacgagaagttgaaaggttcacctgaagataacgaacagaagcaactttttgttgagcagcacaaacattatctcgacgaaatcatagagcaaatttcggaattcagtaagagagtcatcctagctgatgccaatctggacaaagtattaagcgcatacaacaagcacagggataaacccatacgtgagcaggcggaaaatattatccatttgtttactcttaccaacctcggcgctccagccgcattcaagtattttgacacaacgatagatcgcaaacgatacacttctaccaaggaggtgctagacgcgacactgattcaccaatccatcacgggattatatgaaactcggatagatttgtcacagcttgggggtgacggatcccccaagaagaagaggaaagtctcgagcgactacaaagaccatgacggtgattataaagatcatgacatcgattacaaggatgacgatgacaaggctgcagga

SEQ ID NO: 23 - protein, 1404 aa, Streptococcus pyogenes
MDKKYSIGLDIGTNSVGWAVITDEYKVPSKKFKVLGNTDRHSIKKNLIGALLFDSGETAEATRLKRTARRRYTRRKNRICYLQEIFSNEMAKVDDSFFHRLEESFLVEEDKKHERHPIFGNIVDEVAYHEKYPTIYHLRKKLVDSTDKADLRLIYLALAHMIKFRGHFLIEGDLNPDNSDVDKLFIQLVQTYNQLFEENPINASGVDAKAILSARLSKSRRLENLIAQLPGEKKNGLFGNLIALSLGLTPNFKSNFDLAEDAKLQLSKDTYDDDLDNLLAQIGDQYADLFLAAKNLSDAILLSDILRVNTEITKAPLSASMIKRYDEHHQDLTLLKALVRQQLPEKYKEIFFDQSKNGYAGYIDGGASQEEFYKFIKPILEKMDGTEELLVKLNREDLLRKQRTFDNGSIPHQIHLGELHAILRRQEDFYPFLKDNREKIEKILTFRIPYYVGPLARGNSRFAWMTRKSEETITPWNFEEVVDKGASAQSFIERMTNFDKNLPNEKVLPKHSLLYEYFTVYNELTKVKYVTEGMRKPAFLSGEQKKAIVDLLFKTNRKVTVKQLKEDYFKKIECFDSVEISGVEDRFNASLGTYHDLLKIIKDKDFLDNEENEDILEDIVLTLTLFEDREMIEERLKTYAHLFDDKVMKQLKRRRYTGWGRLSRKLINGIRDKQSGKTILDFLKSDGFANRNFMQLIHDDSLTFKEDIQKAQVSGQGDSLHEHIANLAGSPAIKKGILQTVKVVDELVKVMGRHKPENIVIEMARENQTTQKGQKNSRERMKRIEEGIKELGSQILKEHPVENTQLQNEKLYLYYLQNGRDMYVDQELDINRLSDYDVDHIVPQSFLKDDSIDNKVLTRSDKNRGKSDNVPSEEVVKKMKNYWRQLLNAKLITQRKFDNLTKAERGGLSELDKAGFIKRQLVETRQITKHVAQILDSRMNTKYDENDKLIREVKVITLKSKLVSDFRKDFQFYKVREINNYHHAHDAYLNAVVGTALIKKYPKLESEFVYGDYKVYDVRKMIAKSEQEIGKATAKYFFYSNIMNFFKTEITLANGEIRKRPLIETNGETGEIVWDKGRDFATVRKVLSMPQVNIVKKTEVQTGGFSKESILPKRNSDKLIARKKDWDPKKYGGFDSPTVAYSVLVVAKVEKGKSKKLKSVKELLGITIMERSSFEKNPIDFLEAKGYKEVKKDLIIKLPKYSLFELENGRKRMLASAGELQKGNELALPSKYVNFLYLASHYEKLKGSPEDNEQKQLFVEQHKHYLDEIIEQISEFSKRVILADANLDKVLSAYNKHRDKPIREQAENIIHLFTLTNLGAPAAFKYFDTTIDRKRYTSTKEVLDATLIHQSITGLYETRIDLSQLGGDGSPKKKRKVSSDYKDHDGDYKDHDIDYKDDDDKAAG

SEQ ID NO: 24 - DNA, 4107 bp, Streptococcus pyogenes
atggataagaaatactcaataggcttagatatcggcacaaatagcgtcggatgggcggtgatcactgatgaatataaggttccgtctaaaaagttcaaggttctgggaaatacagaccgccacagtatcaaaaaaaatcttataggggctcttttatttgacagtggagagacagcggaagcgactcgtctcaaacggacagctcgtagaaggtatacacgtcggaagaatcgtatttgttatctacaggagattttttcaaatgagatggcgaaagtagatgatagtttctttcatcgacttgaagagtcttttttggtggaagaagacaagaagcatgaacgtcatcctatttttggaaatatagtagatgaagttgcttatcatgagaaatatccaactatctatcatctgcgaaaaaaattggtagattctactgataaagcggatttgcgcttaatctatttggccttagcgcatatgattaagtttcgtggtcattttttgattgagggagatttaaatcctgataatagtgatgtggacaaactatttatccagttggtacaaacctacaatcaattatttgaagaaaaccctattaacgcaagtggagtagatgctaaagcgattctttctgcacgattgagtaaatcaagacgattagaaaatctcattgctcagctccccggtgagaagaaaaatggcttatttgggaatctcattgctttgtcattgggtttgacccctaattttaaatcaaattttgatttggcagaagatgctaaattacagctttcaaaagatacttacgatgatgatttagataatttattggcgcaaattggagatcaatatgctgatttgtttttggcagctaagaatttatcagatgctattttactttcagatatcctaagagtaaatactgaaataactaaggctcccctatcagcttcaatgattaaacgctacgatgaacatcatcaagacttgactcttttaaaagctttagttcgacaacaacttccagaaaagtataaagaaatcttttttgatcaatcaaaaaacggatatgcaggttatattgatgggggagctagccaagaagaattttataaatttatcaaaccaattttagaaaaaatggatggtactgaggaattattggtgaaactaaatcgtgaagatttgctgcgcaagcaacggacctttgacaacggctctattccccatcaaattcacttgggtgagctgcatgctattttgagaagacaagaagacttttatccatttttaaaagacaatcgtgagaagattgaaaaaatcttgacttttcgaattccttattatgttggtccattggcgcgtggcaatagtcgttttgcatggatgactcggaagtctgaagaaacaattaccccatggaattttgaagaagttgtcgataaaggtgcttcagctcaatcatttattgaacgcatgacaaactttgataaaaatcttccaaatgaaaaagtactaccaaaacatagtttgctttatgagtattttacggtttataacgaattgacaaaggtcaaatatgttactgaaggaatgcgaaaaccagcatttctttcaggtgaacagaagaaagccattgttgatttactcttcaaaacaaatcgaaaagtaaccgttaagcaattaaaagaagattatttcaaaaaaatagaatgttttgatagtgttgaaatttcaggagttgaagatagatttaatgcttcattaggtacctaccatgatttgctaaaaattattaaagataaagattttttggataatgaagaaaatgaagatatcttagaggatattgttttaacattgaccttatttgaagatagggagatgattgaggaaagacttaaaacatatgctcacctctttgatgataaggtgatgaaacagcttaaacgtcgccgttatactggttggggacgtttgtctcgaaaattgattaatggtattagggataagcaatctggcaaaacaatattagattttttgaaatcagatggttttgccaatcgcaattttatgcagctgatccatgatgatagtttgacatttaaagaagacattcaaaaagcacaagtgtctggacaaggcgatagtttacatgaacatattgcaaatttagctggtagccctgctattaaaaaaggtattttacagactgtaaaagttgttgatgaattggtcaaagtaatggggcggcataagccagaaaatatcgttattgaaatggcacgtgaaaatcagacaactcaaaagggccagaaaaattcgcgagagcgtatgaaacgaatcgaagaaggtatcaaagaattaggaagtcagattcttaaagagcatcctgttgaaaatactcaattgcaaaatgaaaagctctatctctattatctccaaaatggaagagacatgtatgtggaccaagaattagatattaatcgtttaagtgattatgatgtcgatcacattgttccacaaagtttccttaaagacgattcaatagacaataaggtcttaacgcgttctgataaaaatcgtggtaaatcggataacgttccaagtgaagaagtagtcaaaaagatgaaaaactattggagacaacttctaaacgccaagttaatcactcaacgtaagtttgataatttaacgaaagctgaacgtggaggtttgagtgaacttgataaagctggttttatcaaacgccaattggttgaaactcgccaaatcactaagcatgtggcacaaattttggatagtcgcatgaatactaaatacgatgaaaatgataaacttattcgagaggttaaagtgattaccttaaaatctaaattagtttctgacttccgaaaagatttccaattctataaagtacgtgagattaacaattaccatcatgcccatgatgcgtatctaaatgccgtcgttggaactgctttgattaagaaatatccaaaacttgaatcggagtttgtctatggtgattataaagtttatgatgttcgtaaaatgattgctaagtctgagcaagaaataggcaaagcaaccgcaaaatatttcttttactctaatatcatgaacttcttcaaaacagaaattacacttgcaaatggagagattcgcaaacgccctctaatcgaaactaatggggaaactggagaaattgtctgggataaagggcgagattttgccacagtgcgcaaagtattgtccatgccccaagtcaatattgtcaagaaaacagaagtacagacaggcggattctccaaggagtcaattttaccaaaaagaaattcggacaagcttattgctcgtaaaaaagactgggatccaaaaaaatatggtggttttgatagtccaacggtagcttattcagtcctagtggttgctaaggtggaaaaagggaaatcgaagaagttaaaatccgttaaagagttactagggatcacaattatggaaagaagttcctttgaaaaaaatccgattgactttttagaagctaaaggatataaggaagttaaaaaagacttaatcattaaactacctaaatatagtctttttgagttagaaaacggtcgtaaacggatgctggctagtgccggagaattacaaaaaggaaatgagctggctctgccaagcaaatatgtgaattttttatatttagctagtcattatgaaaagttgaagggtagtccagaagataacgaacaaaaacaattgtttgtggagcagcataagcattatttagatgagattattgagcaaatcagtgaattttctaagcgtgttattttagcagatgccaatttagataaagttcttagtgcatataacaaacatagagacaaaccaatacgtgaacaagcagaaaatattattcatttatttacgttgacgaatcttggagctcccgctgcttttaaatattttgatacaacaattgatcgtaaacgatatacgtctacaaaagaagttttagatgccactcttatccatcaatccatcactggtctttatgaaacacgcattgatttgagtcagctaggaggtgactga

SEQ ID NO: 25 - protein, 1368 aa, Streptococcus pyogenes [sequence omitted]

SEQ ID NO: 26 - protein, 1378 aa, Lactobacillus fermentum
MKEYHIGLDIGTSSIGWAVTDSQFKLMRIKGKTAIGVRLFEEGKTAAERRTFRTTRRRLKRRKWRLHYLDEIFAPHLQEVDENFLRRLKQSNIHPEDPTKNQAFIGKLLFPDLLKKNERGYPTLIKMRDELPVEQRAHYPVMNIYKLREAMINEDRQFDLREVYLAVHHIVKYRGHFLNNASVDKFKVGRIDFDKSFNVLNEAYEELQNGEGSFTIEPSKVEKIGQLLLDTKMRKLDRQKAVAKLLEVKVADKEETKRNKQIATAMSKLVLGYKADFATVAMANGNEWKIDLSSETSEDEIEKFREELSDAQNDILTEITSLFSQIMLNEIVPNGMSISESMMDRYWTHERQLAEVKEYLATQPASARKEFDQVYNKYIGQAPKERGFDLEKGLKKILSKKENWKEIDELLKAGDFLPKQRTSANGVIPHQMHQQELDRIIEKQAKYYPWLATENPATGERDRHQAKYELDQLVSFRIPYYVGPLVTPEVQKATSGAKFAWAKRKEDGEITPWNLWDKIDRAESAEAFIKRMTVKDTYLLNEDVLPANSLLYQKYNVLNELNNVRVNGRRLSVGIKQDIYTELFKKKKTVKASDVASLVMAKTRGVNKPSVEGLSDPKKFNSNLATYLDLKSIVGDKVDDNRYQTDLENIIEWRSVFEDGEIFADKLTEVEWLTDEQRSALVKKRYKGWGRLSKKLLTGIVDENGQRIIDLMWNTDQNFKEIVDQPVFKEQIDQLNQKAITNDGMTLRERVESVLDDAYTSPQNKKAIWQVVRVVEDIVKAVGNAPKSISIEFARNEGNKGEITRSRRTQLQKLFEDQAHELVKDTSLTEELEKAPDLSDRYYFYFTQGGKDMYTGDPINFDEISTKYDIDHILPQSFVKDNSLDNRVLTSRKENNKKSDQVPAKLYAAKMKPYWNQLLKQGLITQRKFENLTKDVDQNIKYRSLGFVKRQLVETRQVIKLTANILGSMYQEAGTEIIETRAGLTKQLREEFDLPKVREVNDYHHAVDAYLTTFAGQYLNRRYPKLRSFFVYGEYMKFKHGSDLKLRNFNFFHELMEGDKSQGKVVDQQTGELITTRDEVAKSFDRLLNMKYMLVSKEVHDRSDQLYGATIVTAKESGKLTSPIEIKKNRLVDLYGAYTNGTSAFMTIIKFTGNKPKYKVIGIPTTSAASLKRAGKPGSESYNQELHRIIKSNPKVKKGFEIVVPHVSYGQLIVDGDCKFTLASPTVQHPATQLVLSKKSLETISSGYKILKDKPAIANERLIRVFDEVVGQMNRYFTIFDQRSNRQKVADARDKFLSLPTESKYEGAKKVQVGKTEVITNLLMGLHANATQGDLKVLGLATFGFFQSTTGLSLSEDTMIVYQSPTGLFERRICLKDI

SEQ ID NO: 27 - protein, 1368 aa, Staphylococcus aureus [sequence omitted]

SEQ ID NO: 28 - protein, 1053 aa, Staphylococcus aureus
MGKRNYILGLDIGITSVGYGIIDYETRDVIDAGVRLFKEANVENNEGRRSKRGARRLKRRRRHRIQRVKKLLFDYNLLTDHSELSGINPYEARVKGLSQKLSEEEFSAALLHLAKRRGVHNVNEVEEDTGNELSTKEQISRNSKALEEKYVAELQLERLKKDGEVRGSINRFKTSDYVKEAKQLLKVQKAYHQLDQSFIDTYIDLLETRRTYYEGPGEGSPFGWKDIKEWYEMLMGHCTYFPEELRSVKYAYNADLYNALNDLNNLVITRDENEKLEYYEKFQIIENVFKQKKKPTLKQIAKEILVNEEDIKGYRVTSTGKPEFTNLKVYHDIKDITARKEIIENAELLDQIAKILTIYQSSEDIQEELTNLNSELTQEEIEQISNLKGYTGTHNLSLKAINLILDELWHTNDNQIAIFNRLKLVPKKVDLSQQKEIPTTLVDDFILSPVVKRSFIQSIKVINAIIKKYGLPNDIIIELAREKNSKDAQKMINEMQKRNRQTNERIEEIIRTTGKENAKYLIEKIKLHDMQEGKCLYSLEAIPLEDLLNNPFNYEVDHIIPRSVSFDNSFNNKVLVKQEENSKKGNRTPFQYLSSSDSKISYETFKKHILNLAKGKGRISKTKKEYLLEERDINRFSVQKDFINRNLVDTRYATRGLMNLLRSYFRVNNLDVKVKSINGGFTSFLRRKWKFKKERNKGYKHHAEDALIIANADFIFKEWKKLDKAKKVMENQMFEEKQAESMPEIETEQEYKEIFITPHQIKHIKDFKDYKYSHRVDKKPNRKLINDTLYSTRKDDKGNTLIVNNLNGLYDKDNDKLKKLINKSPEKLLMYHHDPQTYQKLKLIMEQYGDEKNPLYKYYEETGNYLTKYSKKDNGPVIKKIKYYGNKLNAHLDITDDYPNSRNKVVKLSLKPYRFDVYLDNGVYKFVTVKNLDVIKKENYYEVNSKCYEEAKKLKKISNQAEFIASFYKNDLIKINGELYRVIGVNNDLLNRIEVNMIDITYREYLENMNDKRPPHIIKTIASKTQSIKKYSTDILGNLYEVKSKKHPQIIKK

SEQ ID NO: 29 - protein, 1409 aa, Streptococcus thermophilus
MLFNKCIIISINLDFSNKEKCMTKPYSIGLDIGTNSVGWAVITDNYKVPSKKMKVLGNTSKKYIKKNLLGVLLFDSGITAEGRRLKRTARRRYTRRRNRILYLQEIFSTEMATLDDAFFQRLDDSFLVPDDKRDSKYPIFGNLVEEKVYHDEFPTIYHLRKYLADSTKKADLRLVYLALAHMIKYRGHFLIEGEFNSKNNDIQKNFQDFLDTYNAIFESDLSLENSKQLEEIVKDKISKLEKKDRILKLFPGEKNSGIFSEFLKLIVGNQADFRKCFNLDEKASLHFSKESYDEDLETLLGYIGDDYSDVFLKAKKLYDAILLSGFLTVTDNETEAPLSSAMIKRYNEHKEDLALLKEYIRNISLKTYNEVFKDDTKNGYAGYIDGKTNQEDFYVYLKNLLAEFEGADYFLEKIDREDFLRKQRTFDNGSIPYQIHLQEMRAILDKQAKFYPFLAKNKERIEKILTFRIPYYVGPLARGNSDFAWSIRKRNEKITPWNFEDVIDKESSAEAFINRMTSFDLYLPEEKVLPKHSLLYETFNVYNELTKVRFIAESMRDYQFLDSKQKKDIVRLYFKDKRKVTDKDIIEYLHAIYGYDGIELKGIEKQFNSSLSTYHDLLNIINDKEFLDDSSNEAIIEEIIHTLTIFEDREMIKQRLSKFENIFDKSVLKKLSRRHYTGWGKLSAKLINGIRDEKSGNTILDYLIDDGISNRNFMQLIHDDALSFKKKIQKAQIIGDEDKGNIKEVVKSLPGSPAIKKGILQSIKIVDELVKVMGGRKPESIVVEMARENQYTNQGKSNSQQRLKRLEKSLKELGSKILKENIPAKLSKIDNNALQNDRLYLYYLQNGKDMYTGDDLDIDRLSNYDIDHIIPQAFLKDNSIDNKVLVSSASNRGKSDDFPSLEVVKKRKTFWYQLLKSKLISQRKFDNLTKAERGGLLPEDKAGFIQRQLVETRQITKHVARLLDEKFNNKKDENNRAVRTVKIITLKSTLVSQFRKDFELYKVREINDFHHAHDAYLNAVIASALLKKYPKLEPEFVYGDYPKYNSFRERKSATEKVYFYSNIMNIFKKSISLADGRVIERPLIEVNEETGESVWNKESDLATVRRVLSYPQVNVVKKVEEQNHGLDRGKPKGLFNANLSSKPKPNSNENLVGAKEYLDPKKYGGYAGISNSFAVLVKGTIEKGAKKKITNVLEFQGISILDRINYRKDKLNFLLEKGYKDIELIIELPKYSLFELSDGSRRMLASILSTNNKRGEIHKGNQIFLSQKFVKLLYHAKRISNTINENHRKYVENHKKEFEELFYYILEFNENYVGAKKNGKLLNSAFQSWQNHSIDELCSSFIGPTGSERKGLFELTSRGSAADFEFLGVKIPRYRDYTPSSLLKDATLIHQSVTGLYETRIDLAKLGEG

SEQ ID NO: 30 - protein, 1402 aa, Lactobacillus crispatus
MKIKNYNLALTPSTSAVGHVEVDDDLNILEPVHHQKAIGVAKFGEGETAEARRLARSARRTTKRRANRINHYFNEIMKPEIDKVDPLMFDRIKQAGLSPLDERKEFRTVIFDRPNIASYYHNQFPTIWHLQKYLMITDEKADIRLIYWALHSLLKHRGHFFNTTPMSQFKPGKLNLKDDMLALDDYNDLEGLSFAVANSPEIEKVIKDRSMHKKEKIAELKKLIVNDVPDKDLAKRNNKIITQIVNAIMGNSFHLNFIFDMDLDKLTSKAWSFKLDDPELDTKFDAISGSMTDNQIGIFETLQKIYSAISLLDILNGSSNVVDAKNALYDKHKRDLNLYFKFLNTLPDEIAKTLKAGYTLYIGNRKKDLLAARKLLKVNVAKNFSQDDFYKLINKELKSIDKQGLQTRFSEKVGELVAQNNFLPVQRSSDNVFIPYQLNAITFNKILENQGKYYDFLVKPNPAKKDRKNAPYELSQLMQFTIPYYVGPLVTPEEQVKSGIPKTSRFAWMVRKDNGAITPWNFYDKVDIEATADKFIKRSIAKDSYLLSELVLPKHSLLYEKYEVFNELSNVSLDGKKLSGGVKQILFNEVFKKTNKVNTSRILKALAKHNIPGSKITGLSNPEEFTSSLQTYNAWKKYFPNQIDNFAYQQDLEKMIEWSTVFEDHKILAKKLDEIEWLDDDQKKFVANTRLRGWGRLSKRLLTGLKDNYGKSIMQRLETTKANFQQIVYKPEFREQIDKISQAAAKNQSLEDILANSYTSPSNRKAIRKTMSVVDEYIKLNHGKEPDKIFLMFQRSEQEKGKQTEARSKQLNRILSQLKADKSANKLFSKQLADEFSNAIKKSKYKLNDKQYFYFQQLGRDALTGEVIDYDELYKYTVLHIIPRSKLTDDSQNNKVLTKYKIVDGSVALKFGNSYSDALGMPIKAFWTELNRLKLIPKGKLLNLTTDFSTLNKYQRDGYIARQLVETQQIVKLLATIMQSRFKHTKIIEVRNSQVANIRYQFDYFRIKNLNEYYRGFDAYLAAVVGTYLYKVYPKARRLFVYGQYLKPKKTNQENQDMHLDSEKKSQGFNFLWNLLYGKQDQIFVNGTDVIAFNRKDLITKMNTVYNYKSQKISLAIDYHNGAMFKATLFPRNDRDTAKTRKLIPKKKDYDTDIYGGYTSNVDGYMLLAEIIKRDGNKQYGFYGVPSRLVSELDTLKKTRYTEYEEKLKEIIKPELGVDLKKIKKIKILKNKVPFNQVIIDKGSKFFITSTSYRWNYRQLILSAESQQTLMDLVVDPDFSNHKARKDARKNADERLIKVYEEILYQVKNYMPMFVELHRCYEKLVDAQKTFKSLKISDKAMVLNQILILLHSNATSPVLEKLGYHTRFTLGKKHNLISENAVLVTQSITGLKENHVSIKQML

SEQ ID NO: 31 - protein, 1385 aa, Pedicoccus damnosus
MTNEKYSIGLDIGTSSIGFAVVNDNNRVIRVKGKNAIGVRLFDEGKAAADRRSFRTTRRSFRTTRRRLSRRRWRLKLLREIFDAYITPVDEAFFIRLKESNLSPKDSKKQYSGDILFNDRSDKDFYEKYPTIYHLRNALMTEHRKFDVREIYLAIHHIMKFRGHFLNATPANNFKVGRLNLEEKFEELNDIYQRVFPDESIEFRTDNLEQIKEVLLDNKRSRADRQRTLVSDIYQSSEDKDIEKRNKAVATEILKASLGNKAKLNVITNVEVDKEAAKEWSITFDSESIDDDLAKIEGQMTDDGHEIIEVLRSLYSGITLSAIVPENHTLSQSMVAKYDLHKDHLKLFKKLINGMTDTKKAKNLRAAYDGYIDGVKGKVLPQEDFYKQVQVNLDDSAEANEIQTYIDQDIFMPKQRTKANGSIPHQLQQQELDQIIENQKAYYPWLAELNPNPDKKRQQLAKYKLDELVTFRVPYYVGPMITAKDQKNQSGAEFAWMIRKEPGNITPWNFDQKVDRMATANQFIKRMTTTDTYLLGEDVLPAQSLLYQKFEVLNELNKIRIDHKPISIEQKQQIFNDLFKQFKNVTIKHLQDYLVSQGQYSKRPLIEGLADEKRFNSSLSTYSDLCGIFGAKLVEENDRQEDLEKIIEWSTIFEDKKIYRAKLNDLTWLTDDQKEKLATKRYQGWGRLSRKLLVGLKNSEHRNIMDILWITNENFMQIQAEPDFAKLVTDANKGMLEKTDSQDVINDLYTSPQNKKAIRQILLVVHDIQNAMHGQAPAKIHVEFARGEERNPRRSVQRQRQVEAAYEKVSNELVSAKVRQEFKEAINNKRDFKDRLFLYFMQGGIDIYTGKQLNIDQLSSYQIDHILPQAFVKDDSLTNRVLTNENQVKADSVPIDIFGKKMLSVWGRMKDQGLISKGKYRNLTMNPENISAHTENGFINRQLVETRQVIKLAVNILADEYGDSTQIISVKADLSHQMREDFELLKNRDVNDYHHAFDAYLAAFIGNYLLKRYPKLESYFVYGDFKKFTQKETKMRRFNFIYDLKHCDQVVNKETGEILWTKDEDIKYIRHLFAYKKILVSHEVREKRGALYNQTIYKAKDDKGSGQESKKLIRIKDDKETKIYGGYSGKSLAYMTIVQITKKNKVSYRVIGIPTLALARLNKLENDSTENNGELYKIIKPQFTHYKVDKKNGEIIETTDDFKIVVSKVRFQQLIDDAGQFFMLASDTYKNNAQQLVISNNALKAINNTNITDCPRDDLERLDNLRLDSAFDEIVKKMDKYFSAYDANNFREKIRNSNLIFYQLPVEDQWENNKITELGKRTVLTRILQGLHANATTTDMSIFKIKTPFGQLRQRSGISLSENAQLIYQSPTGLFERRVQLNKIK

SEQ ID NO: 32 - protein, 1367 aa, Fusobaterium nucleatum
MKKQKFSDYYLGFDIGTNSVGWCVTDLDYNVLRFNKKDMWGSRLFEEAKTAAERRVQRNSRRRLKRRKWRLNLLEEIFSNEILKIDSNFFRRLKESSLWLEDKSSKEKFTLFNDDNYKDYDFYKQYPTIFHLRNELIKNPEKKDIRLVYLAIHSIFKSRGHFLFEGQNLKEIKNFETLYNNLIAFLEDNGINKIIDKNNIEKLEKIVCDSKKGLKDKEKEFKEIFNSDKQLVAIFKLSVGSSVSLNDLFDTDEYKKGEVEKEKISFREQIYEDDKPIYYSILGEKIELLDIAKTFYDFMVLNNILADSQYISEAKVKLYEEHKKDLKNLKYIIRKYNKGNYDKLFKDKNENNYSAYIGLNKEKSKKEVIEKSRLKIDDLIKNIKGYLPKVEEIEEKDKAIFNKILNKIELKTILPKQRISDNGTLPYQIHEAELEKILENQSKYYDFLNYEENGIITKDKLLMTFKFRIPYYVGPLNSYHKDKGGNSWIVRKEEGKILPWNFEQKVDIEKSAEEFIKRMTNKCTYLNGEDVIPKDTFLYSEYVILNELNKVQVNDEFLNEENKRKIIDELFKENKKVSEKKFKEYLLVKQIVDGTIELKGVKDSFNSNYISYIRFKDIFGEKLNLDIYKEISEKSILWKCLYGDDKKIFEKKIKNEYGDILTKDEIKKINTFKFNNWGRLSEKLLTGIEFINLETGECYSSVMDALRRTNYNLMELLSSKFTLQESINNENKEMNEASYRDLIEESYVSPSLKRAIFQTLKIYEEIRKITGRVPKKVFIEMARGGDESMKNKKIPARQEQLKKLYDSCGNDIANFSIDIKEMKNSLISYDNNSLRQKKLYLYYLQFGKCMYTGREIDLDRLLQNNDTYDIDHIYPRSKVIKDDSFDNLVLVLKNENAEKSNEYPVKKEIQEKMKSFWRFLKEKNFISDEKYKRLTGKDDFELRGFMARQLVNVRQTTKEVGKILQQIEPEIKIVYSKAEIASSFREMFDFIKVRELNDTHHAKDAYLNIVAGNVYNTKFTEKPYRYLQEIKENYDVKKIYNYDIKNAWDKENSLEIVKKNMEKNTVNITRFIKEKKGQLFDLNPIKKGETSNEIISIKPKVYNGKDDKLNEKYGYYKSLNPAYFLYVEHKEKNKRIKSFERVNLVDVNNIKDEKSLVKYLIENKKLVEPRVIKKVYKRQVILINDYPYSIVTLDSNKLMDFENLKPLFLENKYEKILKNVIKFLEDNQGKSEENYKFIYLKKKDRYEKNETLESVKDRYNLEFNEMYDKFLEKLDSKDYKNYMNNKKYQELLDVKEKFIKLNLFDKAFTLKSFLDLFNRKTMADFSKVGLTKYLGKIQKISSNVLSKNELYLLEESVTGLFVKKIKL

SEQ ID NO: 33 - protein, 1286 aa, Enterococcus cecorum
RRKQRIQILQELLGEEVLKTDPGFFHRMKESRYVVEDKRTLDGKQVELPYALFVDKDYTDKEYYKQFPTINHLIVYLMTTSDTPDIRLVYLALHYYMKNRGNFLHSGDINNVKDINDILEQLDNVLETFLDGWNLKLKSYVEDIKNIYNRDLGRGERKKAFVNTLGAKTKAEKAFCSLISGGSTNLAELFDDSSLKEIETPKIEFASSSLEDKIDGIQEALEDRFAVIEAAKRLYDWKTLTDILGDSSSLAEARVNSYQMHHEQLLELKSLVKEYLDRKVFQEVFVSLNVANNYPAYIGHTKINGKKKELEVKRTKRNDFYSYVKKQVIEPIKKKVSDEAVLTKLSEIESLIEVDKYLPLQVNSDNGVIPYQVKLNELTRIFDNLENRIPVLRENRDKIIKTFKFRIPYYVGSLNGVVKNGKCTNWMVRKEEGKIYPWNFEDKVDLEASAEQFIRRMTNKCTYLVNEDVLPKYSLLYSKYLVLSELNNLRIDGRPLDVKIKQDIYENVFKKNRKVTLKKIKKYLLKEGIITDDDELSGLADDVKSSLTAYRDFKEKLGHLDLSEAQMENIILNITLFGDDKKLLKKRLAALYPFIDDKSLNRIATLNYRDWGRLSERFLSGITSVDQETGELRTIIQCMYETQANLMQLLAEPYHFVEAIEKENPKVDLESISYRIVNDLYVSPAVKRQIWQTLLVIKDIKQVMKHDPERIFIEMAREKQESKKTKSRKQVLSEVYKKAKEYEHLFEKLNSLTEEQLRSKKIYLYFTQLGKCMYSGEPIDFENLVSANSNYDIDHIYPQSKTIDDSFNNIVLVKKSLNAYKSNHYPIDKNIRDNEKVKTLWNTLVSKGLITKEKYERLIRSTPFSDEELAGFIARQLVETRQSTKAVAEILSNWFPESEIVYSKAKNVSNFRQDFEILKVRELNDCHHAHDAYLNIVVGNAYHTKFTNSPYRFIKNKANQEYNLRKLLQKVNKIESNGVVAWVGQSENNPGTIATVKKVIRRNTVLISRMVKEVDGQLFDLTLMKKGKGQVPIKSSDERLTDISKYGGYNKATGAYFTFVKSKKRGKVVRSFEYVPLHLSKQFENNNELLKEYIEKDRGLTDVEILIPKVLINSLFRYNGSLVRITGRGDTRLLLVHEQPLYVSNSFVQQLKSVSSYKLKKSENDNAKLTKTATEKLSNIDELYDGLLRKLDLPIYSYWFSSIKEYLVESRTKYIKLSIEEKALVIFEILHLFQSDAQVPNLKILGLSTKPSRIRIQKNLKDTDKMSIIHQSPSGIFEHEIELTSL

SEQ ID NO: 34 - protein, 1312 aa, Anaerostipes hadrus
MQNGFLGITVSSEQVGWAVTNPKYELERASRKDLWGVRLFDKAETAEDRRMFRTNRRLNQRKKNRIHYLRDIFHEEVNQKDPNFFQQLDESNFCEDDRTVEFNFDTNLYKNQFPTVYHLRKYLMETKDKPDIRLVYLAFSKFMKNRGHFLYKGNLGEVMDFENSMKGFCESLEKFNIDFPTLSDEQVKEVRDILCDHKIAKTVKKKNIITITKVKSKTAKAWIGLFCGCSVPVKVLFQDIDEEIVTDPEKISFEDASYDDYIANIEKGVGIYYEAIVSAKMLFDWSILNEILGDHQLLSDAMIAEYNKHHDDLKRLQKIIKGTGSRELYQDIFINDVSGNYVCYVGHAKTMSSADQKQFYTFLKNRLKNVNGISSEDAEWIDTEIKNGTLLPKQTKRDNSVIPHQLQLREFELILDNMQEMYPFLKENREKLLKIFNFVIPYYVGPLKGVVRKGESTNWMVPKKDGVIHPWNFDEMVDKEASAECFISRMTGNCSYLFNEKVLPKNSLLYETFEVLNELNPLKINGEPISVELKQRIYEQLFLTGKKVTKKSLTKYLIKNGYDKDIELSGIDNEFHSNLKSHIDFEDYDNLSDEEVEQIILRITVFEDKQLLKDYLNREFVKLSEDERKQICSLSYKGWGNLSEMLLNGITVTDSNGVEVSVMDMLWNTNLNLMQILSKKYGYKAEIEHYNKEHEKTIYNREDLMDYLNIPPAQRRKVNQLITIVKSLKKTYGVPNKIFFKISREHQDDPKRTSSRKEQLKYLYKSLKSEDEKHLMKELDELNDHELSNDKVYLYFLQKGRCIYSGKKLNLSRLRKSNYQNDIDYIYPLSAVNDRSMNNKVLTGIQENRADKYTYFPVDSEIQKKMKGFWMELVLQGFMTKEKYFRLSRENDFSKSELVSFIEREISDNQQSGRMIASVLQYYFPESKIVFVKEKLISSFKRDFHLISSYGHNHLQAAKDAYITIVVGNVYHTKFTMDPAIYFKNHKRKDYDLNRLFLENISRDGQIAWESGPYGSIQTVRKEYAQNHIAVTKRVVEVKGGLFKQMPLKKGHGEYPLKTNDPRFGNIAQYGGYTNVTGSYFVLVESMEKGKKRISLEYVPVYLHERLEDDPGHKLLKEYLVDHRKLNHPKILLAKVRKNSLLKIDGFYYRLNGRSGNALILTNAVELIMDDWQTKTANKISGYMKRRAIDKKARVYQNEFHIQELEQLYDFYLDKLKNGVYKNRKNNQAELIHNEKEQFMELKTEDQCVLLTEIKKLFVCSPMQADLTLIGGSKHTGMIAMSSNVTKADFAVIAEDPLGLRNKVIYSHKGEK

SEQ ID NO: 35 - protein, 1344 aa, Kandleria vitulina
MSQNNNKIYNIGLDIGDASVGWAVVDEHYNLLKRHGKHMWGSRLFTQANTAVERRSSRSTRRRYNKRRERIRLLREIMEDMVLDVDPTFFIRLANVSFLDQEDKKDYLKENYHSNYNLFIDKDFNDKTYYDKYPTIYHLRKHLCESKEKEDPRLIYLALHHIVKYRGNFLYEGQKFSMDVSNIEDKMIDVLRQFNEINLFEYVEDRKKIDEVLNVLKEPLSKKHKAEKAFALFDTTKDNKAAYKELCAALAGNKFNVTKMLKEAELHDEDEKDISFKFSDATFDDAFVEKQPLLGDCVEFIDLLHDIYSWVELQNILGSAHTSEPSISAAMIQRYEDHKNDLKLLKDVIRKYLPKKYFEVFRDEKSKKNNYCNYINHPSKTPVDEFYKYIKKLIEKIDDPDVKTILNKIELESFMLKQNSRTNGAVPYQMQLDELNKILENQSVYYSDLKDNEDKIRSILTFRIPYYFGPLNITKDRQFDWIIKKEGKENERILPWNANEIVDVDKTADEFIKRMRNFCTYFPDEPVMAKNSLTVSKYEVLNEINKLRINDHLIKRDMKDKMLHTLFMDHKSISANAMKKWLVKNQYFSNTDDIKIEGFQKENACSTSLTPWIDFTKIFGKINESNYDFIEKIIYDVTVFEDKKILRRRLKKEYDLDEEKIKKILKLKYSGWSRLSKKLLSGIKTKYKDSTRTPETVLEVMERTNMNLMQVINDEKLGFKKTIDDANSTSVSGKFSYAEVQELAGSPAIKRGIWQALLIVDEIKKIMKHEPAHVYIEFARNEDEKERKDSFVNQMLKLYKDYDFEDETEKEANKHLKGEDAKSKIRSERLKLYYTQMGKCMYTGKSLDIDRLDTYQVDHIVPQSLLKDDSIDNKVLVLSSENQRKLDDLVIPSSIRNKMYGFWEKLFNNKIISPKKFYSLIKTEFNEKDQERFINRQIVETRQITKHVAQIIDNHYENTKVVTVRADLSHQFRERYHIYKNRDINDFHHAHDAYIATILGTYIGHRFESLDAKYIYGEYKRIFRNQKNKGKEMKKNNDGFILNSMRNIYADKDTGEIVWDPNYIDRIKKCFYYKDCFVTKKLEENNGTFFNVTVLPNDTNSDKDNTLATVPVNKYRSNVNKYGGFSGVNSFIVAIKGKKKKGKKVIEVNKLTGIPLMYKNADEEIKINYLKQAEDLEEVQIGKEILKNQLIEKDGGLYYIVAPTEIINAKQLILNESQTKLVCEIYKAMKYKNYDNLDSEKIIDLYRLLINKMELYYPEYRKQLVKKFEDRYEQLKVISIEEKCNIIKQILATLHCNSSIGKIMYSDFKISTTIGRLNGRTISLDDISFIAESPTGMYSKKYKL

SEQ ID NO: 36 - protein, 1288 aa, Enterococcus faecalis
MRLFEEGHTAEDRRLKRTARRRISRRRNRLRYLQAFFEEAMTDLDENFFARLQESFLVPEDKKWHRHPIFAKLEDEVAYHETYPTIYHLRKKLADSSEQADLRLIYLALAHIVKYRGHFLIEGKLSTENTSVKDQFQQFMVIYNQTFVNGESRLVSAPLPESVLIEEELTEKASRTKKSEKVLQQFPQEKANGLFGQFLKLMVGNKADFKKVFGLEEEAKITYASESYEEDLEGILAKVGDEYSDVFLAAKNVYDAVELSTILADSDKKSHAKLSSSMIVRFTEHQEDLKKFKRFIRENCPDEYDNLFKNEQKDGYAGYIAHAGKVSQLKFYQYVKKIIQDIAGAEYFLEKIAQENFLRKQRTFDNGVIPHQIHLAELQAIIHRQAAYYPFLKENQEKIEQLVTFRIPYYVGPLSKGDASTFAWLKRQSEEPIRPWNLQETVDLDQSATAFIERMTNFDTYLPSEKVLPKHSLLYEKFMVFNELTKISYTDDRGIKANFSGKEKEKIFDYLFKTRRKVKKKDIIQFYRNEYNTEIVTLSGLEEDQFNASFSTYQDLLKCGLTRAELDHPDNAEKLEDIIKILTIFEDRQRIRTQLSTFKGQFSAEVLKKLERKHYTGWGRLSKKLINGIYDKESGKTILDYLVKDDGVSKHYNRNFMQLINDSQLSFKNAIQKAQSSEHEETLSETVNELAGSPAIKKGIYQSLKIVDELVAIMGYAPKRIVVEMARENQTTSTGKRRSIQRLKIVEKAMAEIGSNLLKEQPTTNEQLRDTRLFLYYMQNGKDMYTGDELSLHRLSHYDIDHIIPQSFMKDDSLDNLVLVGSTENRGKSDDVPSKEVVKDMKAYWEKLYAAGLISQRKFQRLTKGEQGGLTLEDKAHFIQRQLVETRQITKNVAGILDQRYNAKSKEKKVQIITLKASLTSQFRSIFGLYKVREVNDYHHGQDAYLNCVVATTLLKVYPNLAPEFVYGEYPKFQTFKENKATAKAIIYTNLLRFFTEDEPRFTKDGEILWSNSYLKTIKKELNYHQMNIVKKVEVQKGGFSKESIKPKGPSNKLIPVKNGLDPQKYGGFDSPVVAYTVLFTHEKGKKPLIKQEILGITIMEKTRFEQNPILFLEEKGFLRPRVLMKLPKYTLYEFPEGRRRLLASAKEAQKGNQMVLPEHLLTLLYHAKQCLLPNQSESLAYVEQHQPEFQEILERVVDFAEVHTLAKSKVQQIVKLFEANQTADVKEIAASFIQLMQFNAMGAPSTFKFFQKDIERARYTSIKEIFDATIIYQSPTGLYETRRKVVD

SEQ ID NO: 37 - protein, 1052 aa, Staphylococcus aureus
KRNYILGLDIGITSVGYGIIDYETRDVIDAGVRLFKEANVENNEGRRSKRGARRLKRRRRHRIQRVKKLLFDYNLLTDHSELSGINPYEARVKGLSQKLSEEEFSAALLHLAKRRGVHNVNEVEEDTGNELSTKEQISRNSKALEEKYVAELQLERLKKDGEVRGSINRFKTSDYVKEAKQLLKVQKAYHQLDQSFIDTYIDLLETRRTYYEGPGEGSPFGWKDIKEWYEMLMGHCTYFPEELRSVKYAYNADLYNALNDLNNLVITRDENEKLEYYEKFQIIENVFKQKKKPTLKQIAKEILVNEEDIKGYRVTSTGKPEFTNLKVYHDIKDITARKEIIENAELLDQIAKILTIYQSSEDIQEELTNLNSELTQEEIEQISNLKGYTGTHNLSLKAINLILDELWHTNDNQIAIFNRLKLVPKKVDLSQQKEIPTTLVDDFILSPVVKRSFIQSIKVINAIIKKYGLPNDIIIELAREKNSKDAQKMINEMQKRNRQTNERIEEIIRTTGKENAKYLIEKIKLHDMQEGKCLYSLEAIPLEDLLNNPFNYEVDHIIPRSVSFDNSFNNKVLVKQEENSKKGNRTPFQYLSSSDSKISYETFKKHILNLAKGKGRISKTKKEYLLEERDINRFSVQKDFINRNLVDTRYATRGLMNLLRSYFRVNNLDVKVKSINGGFTSFLRRKWKFKKERNKGYKHHAEDALIIANADFIFKEWKKLDKAKKVMENQMFEEKQAESMPEIETEQEYKEIFITPHQIKHIKDFKDYKYSHRVDKKPNRELINDTLYSTRKDDKGNTLIVNNLNGLYDKDNDKLKKLINKSPEKLLMYHHDPQTYQKLKLIMEQYGDEKNPLYKYYEETGNYLTKYSKKDNGPVIKKIKYYGNKLNAHLDITDDYPNSRNKVVKLSLKPYRFDVYLDNGVYKFVTVKNLDVIKKENYYEVNSKCYEEAKKLKKISNQAEFIASFYNNDLIKINGELYRVIGVNNDLLNRIEVNMIDITYREYLENMNDKRPPRIIKTIASKTQSIKKYSTDILGNLYEVKSKKHPQIIKKG

SEQ ID NO: 38 - protein, 1082 aa, Geobacillus thermodenitrificans
MKYKIGLDIGITSIGWAVINLDIPRIEDLGVRIFDRAENPKTGESLALPRRLARSARRRLRRRKHRLERIRRLFVREGILTKEELNKLFEKKHEIDVWQLRVEALDRKLNNDELARILLHLAKRRGFRSNRKSERTNKENSTMLKHIEENQSILSSYRTVAEMVVKDPKFSLHKRNKEDNYTNTVARDDLEREIKLIFAKQREYGNIVCTEAFEHEYISIWASQRPFASKDDIEKKVGFCTFEPKEKRAPKATYTFQSFTVWEHINKLRLVSPGGIRALTDDERRLIYKQAFHKNKITFHDVRTLLNLPDDTRFKGLLYDRNTTLKENEKVRFLELGAYHKIRKAIDSVYGKGAAKSFRPIDFDTFGYALTMFKDDTDIRSYLRNEYEQNGKRMENLADKVYDEELIEELLNLSFSKFGHLSLKALRNILPYMEQGEVYSTACERAGYTFTGPKKKQKTVLLPNIPPIANPVVMRALTQARKVVNAIIKKYGSPVSIHIELARELSQSFDERRKMQKEQEGNRKKNETAIRQLVEYGLTLNPTGLDIVKFKLWSEQNGKCAYSLQPIEIERLLEPGYTEVDHVIPYSRSLDDSYTNKVLVLTKENREKGNRTPAEYLGLGSERWQQFETFVLTNKQFSKKKRDRLLRLHYDENEENEFKNRNLNDTRYISRFLANFIREHLKFADSDDKQKVYTVNGRITAHLRSRWNFNKNREESNLHHAVDAAIVACTTPSDIARVTAFYQRREQNKELSKKTDPQFPQPWPHFADELQARLSKNPKESIKALNLGNYDNEKLESLQPVFVSRMPKRSITGAAHQETLRRYIGIDERSGKIQTVVKKKLSEIQLDKTGHFPMYGKESDPRTYEAIRQRLLEHNNDPKKAFQEPLYKPKKNGELGPIIRTIKIIDTTNQVIPLNDGKTVAYNSNIVRVDVFEKDGKYYCVPIYTIDMMKGILPNKAIEPNKPYSEWKEMTEDYTFRFSLYPNDLIRIEFPREKTIKTAVGEEIKIKDLFAYYQTIDSSNGGLSLVSHDNNFSLRSIGSRTLKRFEKYQVDVLGNIYKVRGEKRVGVASSSHSKAGETIRPL

SEQ ID NO: 39 - protein, 1375 aa, S. canis
MEKKYSIGLDIGTNSVGWAVITDDYKVPSKKFKVLGNTNRKSIKKNLMGALLFDSGETAEATRLKRTARRRYTRRKNRIRYLQEIFANEMAKLDDSFFQRLEESFLVEEDKKNERHPIFGNLADEVAYHRNYPTIYHLRKKLADSPEKADLRLIYLALAHIIKFRGHFLIEGKLNAENSDVAKLFYQLIQTYNQLFEESPLDEIEVDAKGILSARLSKSKRLEKLIAVFPNEKKNGLFGNIIALALGLTPNFKSNFDLTEDAKLQLSKDTYDDDLDELLGQIGDQYADLFSAAKNLSDAILLSDILRSNSEVTKAPLSASMVKRYDEHHQDLALLKTLVRQQFPEKYAEIFKDDTKNGYAGYVGIGIKHRKRTTKLATQEEFYKFIKPILEKMDGAEELLAKLNRDDLLRKQRTFDNGSIPHQIHLKELHAILRRQEEFYPFLKENREKIEKILTFRIPYYVGPLARGNSRFAWLTRKSEEAITPWNFEEVVDKGASAQSFIERMTNFDEQLPNKKVLPKHSLLYEYFTVYNELTKVKYVTERMRKPEFLSGEQKKAIVDLLFKTNRKVTVKQLKEDYFKKIECFDSVEIIGVEDRFNASLGTYHDLLKIIKDKDFLDNEENEDILEDIVLTLTLFEDREMIEERLKTYAHLFDDKVMKQLKRRHYTGWGRLSRKMINGIRDKQSGKTILDFLKSDGFSNRNFMQLIHDDSLTFKEEIEKAQVSGQGDSLHEQIADLAGSPAIKKGILQTVKIVDELVKVMGHKPENIVIEMARENQTTTKGLQQSRERKKRIEEGIKELESQILKENPVENTQLQNEKLYLYYLQNGRDMYVDQELDINRLSDYDVDHIVPQSFIKDDSIDNKVLTRSVENRGKSDNVPSEEVVKKMKNYWRQLLNAKLITQRKFDNLTKAERGGLSEADKAGFIKRQLVETRQITKHVARILDSRMNTKRDKNDKPIREVKVITLKSKLVSDFRKDFQLYKVRDINNYHHAHDAYLNAVVGTALIKKYPKLESEFVYGDYKVYDVRKMIAKSEQEIGKATAKRFFYSNIMNFFKTEVKLANGEIRKRPLIETNGETGEVVWNKEKDFATVRKVLAMPQVNIVKKTEVQTGGFSKESILSKRESAKLIPRKKGWDTRKYGGFGSPTVAYSILVVAKVEKGKAKKLKSVKVLVGITIMEKGSYEKDPIGFLEAKGYKDIKKELIFKLPKYSLFELENGRRRMLASATELQKANELVLPQHLVRLLYYTQNISATTGSNNLGYIEQHREEFKEIFEKIIDFSEKYILKNKVNSNLKSSFDEQFAVSDSILLSNSFVSLLKYTSFGASGGFTFLDLDVKQGRLRYQTVTEVLDATLIYQSITGLYETRTDLSQLGGD

SEQ ID NO: 40 - protein, 1368 aa, Streptococcus pyogenes
  SITE (10)..(10): Xaa can be any naturally occurring amino acid
  SITE (840)..(840): Xaa can be any naturally occurring amino acid
MDKKYSIGLXIGTNSVGWAVITDEYKVPSKKFKVLGNTDRHSIKKNLIGALLFDSGETAEATRLKRTARRRYTRRKNRICYLQEIFSNEMAKVDDSFFHRLEESFLVEEDKKHERHPIFGNIVDEVAYHEKYPTIYHLRKKLVDSTDKADLRLIYLALAHMIKFRGHFLIEGDLNPDNSDVDKLFIQLVQTYNQLFEENPINASGVDAKAILSARLSKSRRLENLIAQLPGEKKNGLFGNLIALSLGLTPNFKSNFDLAEDAKLQLSKDTYDDDLDNLLAQIGDQYADLFLAAKNLSDAILLSDILRVNTEITKAPLSASMIKRYDEHHQDLTLLKALVRQQLPEKYKEIFFDQSKNGYAGYIDGGASQEEFYKFIKPILEKMDGTEELLVKLNREDLLRKQRTFDNGSIPHQIHLGELHAILRRQEDFYPFLKDNREKIEKILTFRIPYYVGPLARGNSRFAWMTRKSEETITPWNFEEVVDKGASAQSFIERMTNFDKNLPNEKVLPKHSLLYEYFTVYNELTKVKYVTEGMRKPAFLSGEQKKAIVDLLFKTNRKVTVKQLKEDYFKKIECFDSVEISGVEDRFNASLGTYHDLLKIIKDKDFLDNEENEDILEDIVLTLTLFEDREMIEERLKTYAHLFDDKVMKQLKRRRYTGWGRLSRKLINGIRDKQSGKTILDFLKSDGFANRNFMQLIHDDSLTFKEDIQKAQVSGQGDSLHEHIANLAGSPAIKKGILQTVKVVDELVKVMGRHKPENIVIEMARENQTTQKGQKNSRERMKRIEEGIKELGSQILKEHPVENTQLQNEKLYLYYLQNGRDMYVDQELDINRLSDYDVDXIVPQSFLKDDSIDNKVLTRSDKNRGKSDNVPSEEVVKKMKNYWRQLLNAKLITQRKFDNLTKAERGGLSELDKAGFIKRQLVETRQITKHVAQILDSRMNTKYDENDKLIREVKVITLKSKLVSDFRKDFQFYKVREINNYHHAHDAYLNAVVGTALIKKYPKLESEFVYGDYKVYDVRKMIAKSEQEIGKATAKYFFYSNIMNFFKTEITLANGEIRKRPLIETNGETGEIVWDKGRDFATVRKVLSMPQVNIVKKTEVQTGGFSKESILPKRNSDKLIARKKDWDPKKYGGFDSPTVAYSVLVVAKVEKGKSKKLKSVKELLGITIMERSSFEKNPIDFLEAKGYKEVKKDLIIKLPKYSLFELENGRKRMLASAGELQKGNELALPSKYVNFLYLASHYEKLKGSPEDNEQKQLFVEQHKHYLDEIIEQISEFSKRVILADANLDKVLSAYNKHRDKPIREQAENIIHLFTLTNLGAPAAFKYFDTTIDRKRYTSTKEVLDATLIHQSITGLYETRIDLSQLGGD

SEQ ID NO: 41 - protein, 1368 aa, Streptococcus pyogenes
MDKKYSIGLAIGTNSVGWAVITDEYKVPSKKFKVLGNTDRHSIKKNLIGALLFDSGETAEATRLKRTARRRYTRRKNRICYLQEIFSNEMAKVDDSFFHRLEESFLVEEDKKHERHPIFGNIVDEVAYHEKYPTIYHLRKKLVDSTDKADLRLIYLALAHMIKFRGHFLIEGDLNPDNSDVDKLFIQLVQTYNQLFEENPINASGVDAKAILSARLSKSRRLENLIAQLPGEKKNGLFGNLIALSLGLTPNFKSNFDLAEDAKLQLSKDTYDDDLDNLLAQIGDQYADLFLAAKNLSDAILLSDILRVNTEITKAPLSASMIKRYDEHHQDLTLLKALVRQQLPEKYKEIFFDQSKNGYAGYIDGGASQEEFYKFIKPILEKMDGTEELLVKLNREDLLRKQRTFDNGSIPHQIHLGELHAILRRQEDFYPFLKDNREKIEKILTFRIPYYVGPLARGNSRFAWMTRKSEETITPWNFEEVVDKGASAQSFIERMTNFDKNLPNEKVLPKHSLLYEYFTVYNELTKVKYVTEGMRKPAFLSGEQKKAIVDLLFKTNRKVTVKQLKEDYFKKIECFDSVEISGVEDRFNASLGTYHDLLKIIKDKDFLDNEENEDILEDIVLTLTLFEDREMIEERLKTYAHLFDDKVMKQLKRRRYTGWGRLSRKLINGIRDKQSGKTILDFLKSDGFANRNFMQLIHDDSLTFKEDIQKAQVSGQGDSLHEHIANLAGSPAIKKGILQTVKVVDELVKVMGRHKPENIVIEMARENQTTQKGQKNSRERMKRIEEGIKELGSQILKEHPVENTQLQNEKLYLYYLQNGRDMYVDQELDINRLSDYDVDAIVPQSFLKDDSIDNKVLTRSDKNRGKSDNVPSEEVVKKMKNYWRQLLNAKLITQRKFDNLTKAERGGLSELDKAGFIKRQLVETRQITKHVAQILDSRMNTKYDENDKLIREVKVITLKSKLVSDFRKDFQFYKVREINNYHHAHDAYLNAVVGTALIKKYPKLESEFVYGDYKVYDVRKMIAKSEQEIGKATAKYFFYSNIMNFFKTEITLANGEIRKRPLIETNGETGEIVWDKGRDFATVRKVLSMPQVNIVKKTEVQTGGFSKESILPKRNSDKLIARKKDWDPKKYGGFDSPTVAYSVLVVAKVEKGKSKKLKSVKELLGITIMERSSFEKNPIDFLEAKGYKEVKKDLIIKLPKYSLFELENGRKRMLASAGELQKGNELALPSKYVNFLYLASHYEKLKGSPEDNEQKQLFVEQHKHYLDEIIEQISEFSKRVILADANLDKVLSAYNKHRDKPIREQAENIIHLFTLTNLGAPAAFKYFDTTIDRKRYTSTKEVLDATLIHQSITGLYETRIDLSQLGGD

SEQ ID NO: 42 - protein, 1368 aa, Streptococcus pyogenes
  SITE (10)..(10): Xaa can be any naturally occurring amino acid
MDKKYSIGLXIGTNSVGWAVITDEYKVPSKKFKVLGNTDRHSIKKNLIGALLFDSGETAEATRLKRTARRRYTRRKNRICYLQEIFSNEMAKVDDSFFHRLEESFLVEEDKKHERHPIFGNIVDEVAYHEKYPTIYHLRKKLVDSTDKADLRLIYLALAHMIKFRGHFLIEGDLNPDNSDVDKLFIQLVQTYNQLFEENPINASGVDAKAILSARLSKSRRLENLIAQLPGEKKNGLFGNLIALSLGLTPNFKSNFDLAEDAKLQLSKDTYDDDLDNLLAQIGDQYADLFLAAKNLSDAILLSDILRVNTEITKAPLSASMIKRYDEHHQDLTLLKALVRQQLPEKYKEIFFDQSKNGYAGYIDGGASQEEFYKFIKPILEKMDGTEELLVKLNREDLLRKQRTFDNGSIPHQIHLGELHAILRRQEDFYPFLKDNREKIEKILTFRIPYYVGPLARGNSRFAWMTRKSEETITPWNFEEVVDKGASAQSFIERMTNFDKNLPNEKVLPKHSLLYEYFTVYNELTKVKYVTEGMRKPAFLSGEQKKAIVDLLFKTNRKVTVKQLKEDYFKKIECFDSVEISGVEDRFNASLGTYHDLLKIIKDKDFLDNEENEDILEDIVLTLTLFEDREMIEERLKTYAHLFDDKVMKQLKRRRYTGWGRLSRKLINGIRDKQSGKTILDFLKSDGFANRNFMQLIHDDSLTFKEDIQKAQVSGQGDSLHEHIANLAGSPAIKKGILQTVKVVDELVKVMGRHKPENIVIEMARENQTTQKGQKNSRERMKRIEEGIKELGSQILKEHPVENTQLQNEKLYLYYLQNGRDMYVDQELDINRLSDYDVDHIVPQSFLKDDSIDNKVLTRSDKNRGKSDNVPSEEVVKKMKNYWRQLLNAKLITQRKFDNLTKAERGGLSELDKAGFIKRQLVETRQITKHVAQILDSRMNTKYDENDKLIREVKVITLKSKLVSDFRKDFQFYKVREINNYHHAHDAYLNAVVGTALIKKYPKLESEFVYGDYKVYDVRKMIAKSEQEIGKATAKYFFYSNIMNFFKTEITLANGEIRKRPLIETNGETGEIVWDKGRDFATVRKVLSMPQVNIVKKTEVQTGGFSKESILPKRNSDKLIARKKDWDPKKYGGFDSPTVAYSVLVVAKVEKGKSKKLKSVKELLGITIMERSSFEKNPIDFLEAKGYKEVKKDLIIKLPKYSLFELENGRKRMLASAGELQKGNELALPSKYVNFLYLASHYEKLKGSPEDNEQKQLFVEQHKHYLDEIIEQISEFSKRVILADANLDKVLSAYNKHRDKPIREQAENIIHLFTLTNLGAPAAFKYFDTTIDRKRYTSTKEVLDATLIHQSITGLYETRIDLSQLGGD

SEQ ID NO: 43 - protein, 1368 aa, Streptococcus pyogenes
  SITE (762)..(762): Xaa can be any naturally occurring amino acid
MDKKYSIGLDIGTNSVGWAVITDEYKVPSKKFKVLGNTDRHSIKKNLIGALLFDSGETAEATRLKRTARRRYTRRKNRICYLQEIFSNEMAKVDDSFFHRLEESFLVEEDKKHERHPIFGNIVDEVAYHEKYPTIYHLRKKLVDSTDKADLRLIYLALAHMIKFRGHFLIEGDLNPDNSDVDKLFIQLVQTYNQLFEENPINASGVDAKAILSARLSKSRRLENLIAQLPGEKKNGLFGNLIALSLGLTPNFKSNFDLAEDAKLQLSKDTYDDDLDNLLAQIGDQYADLFLAAKNLSDAILLSDILRVNTEITKAPLSASMIKRYDEHHQDLTLLKALVRQQLPEKYKEIFFDQSKNGYAGYIDGGASQEEFYKFIKPILEKMDGTEELLVKLNREDLLRKQRTFDNGSIPHQIHLGELHAILRRQEDFYPFLKDNREKIEKILTFRIPYYVGPLARGNSRFAWMTRKSEETITPWNFEEVVDKGASAQSFIERMTNFDKNLPNEKVLPKHSLLYEYFTVYNELTKVKYVTEGMRKPAFLSGEQKKAIVDLLFKTNRKVTVKQLKEDYFKKIECFDSVEISGVEDRFNASLGTYHDLLKIIKDKDFLDNEENEDILEDIVLTLTLFEDREMIEERLKTYAHLFDDKVMKQLKRRRYTGWGRLSRKLINGIRDKQSGKTILDFLKSDGFANRNFMQLIHDDSLTFKEDIQKAQVSGQGDSLHEHIANLAGSPAIKKGILQTVKVVDELVKVMGRHKPENIVIXMARENQTTQKGQKNSRERMKRIEEGIKELGSQILKEHPVENTQLQNEKLYLYYLQNGRDMYVDQELDINRLSDYDVDHIVPQSFLKDDSIDNKVLTRSDKNRGKSDNVPSEEVVKKMKNYWRQLLNAKLITQRKFDNLTKAERGGLSELDKAGFIKRQLVETRQITKHVAQILDSRMNTKYDENDKLIREVKVITLKSKLVSDFRKDFQFYKVREINNYHHAHDAYLNAVVGTALIKKYPKLESEFVYGDYKVYDVRKMIAKSEQEIGKATAKYFFYSNIMNFFKTEITLANGEIRKRPLIETNGETGEIVWDKGRDFATVRKVLSMPQVNIVKKTEVQTGGFSKESILPKRNSDKLIARKKDWDPKKYGGFDSPTVAYSVLVVAKVEKGKSKKLKSVKELLGITIMERSSFEKNPIDFLEAKGYKEVKKDLIIKLPKYSLFELENGRKRMLASAGELQKGNELALPSKYVNFLYLASHYEKLKGSPEDNEQKQLFVEQHKHYLDEIIEQISEFSKRVILADANLDKVLSAYNKHRDKPIREQAENIIHLFTLTNLGAPAAFKYFDTTIDRKRYTSTKEVLDATLIHQSITGLYETRIDLSQLGGD

SEQ ID NO: 44 - protein, 1368 aa, Streptococcus pyogenes
  SITE (983)..(983): Xaa can be any naturally occurring amino acid
MDKKYSIGLDIGTNSVGWAVITDEYKVPSKKFKVLGNTDRHSIKKNLIGALLFDSGETAEATRLKRTARRRYTRRKNRICYLQEIFSNEMAKVDDSFFHRLEESFLVEEDKKHERHPIFGNIVDEVAYHEKYPTIYHLRKKLVDSTDKADLRLIYLALAHMIKFRGHFLIEGDLNPDNSDVDKLFIQLVQTYNQLFEENPINASGVDAKAILSARLSKSRRLENLIAQLPGEKKNGLFGNLIALSLGLTPNFKSNFDLAEDAKLQLSKDTYDDDLDNLLAQIGDQYADLFLAAKNLSDAILLSDILRVNTEITKAPLSASMIKRYDEHHQDLTLLKALVRQQLPEKYKEIFFDQSKNGYAGYIDGGASQEEFYKFIKPILEKMDGTEELLVKLNREDLLRKQRTFDNGSIPHQIHLGELHAILRRQEDFYPFLKDNREKIEKILTFRIPYYVGPLARGNSRFAWMTRKSEETITPWNFEEVVDKGASAQSFIERMTNFDKNLPNEKVLPKHSLLYEYFTVYNELTKVKYVTEGMRKPAFLSGEQKKAIVDLLFKTNRKVTVKQLKEDYFKKIECFDSVEISGVEDRFNASLGTYHDLLKIIKDKDFLDNEENEDILEDIVLTLTLFEDREMIEERLKTYAHLFDDKVMKQLKRRRYTGWGRLSRKLINGIRDKQSGKTILDFLKSDGFANRNFMQLIHDDSLTFKEDIQKAQVSGQGDSLHEHIANLAGSPAIKKGILQTVKVVDELVKVMGRHKPENIVIEMARENQTTQKGQKNSRERMKRIEEGIKELGSQILKEHPVENTQLQNEKLYLYYLQNGRDMYVDQELDINRLSDYDVDHIVPQSFLKDDSIDNKVLTRSDKNRGKSDNVPSEEVVKKMKNYWRQLLNAKLITQRKFDNLTKAERGGLSELDKAGFIKRQLVETRQITKHVAQILDSRMNTKYDENDKLIREVKVITLKSKLVSDFRKDFQFYKVREINNYHXAHDAYLNAVVGTALIKKYPKLESEFVYGDYKVYDVRKMIAKSEQEIGKATAKYFFYSNIMNFFKTEITLANGEIRKRPLIETNGETGEIVWDKGRDFATVRKVLSMPQVNIVKKTEVQTGGFSKESILPKRNSDKLIARKKDWDPKKYGGFDSPTVAYSVLVVAKVEKGKSKKLKSVKELLGITIMERSSFEKNPIDFLEAKGYKEVKKDLIIKLPKYSLFELENGRKRMLASAGELQKGNELALPSKYVNFLYLASHYEKLKGSPEDNEQKQLFVEQHKHYLDEIIEQISEFSKRVILADANLDKVLSAYNKHRDKPIREQAENIIHLFTLTNLGAPAAFKYFDTTIDRKRYTSTKEVLDATLIHQSITGLYETRIDLSQLGGD

SEQ ID NO: 45 - protein, 1368 aa, Streptococcus pyogenes
  SITE (986)..(986): Xaa can be any naturally occurring amino acid
MDKKYSIGLDIGTNSVGWAVITDEYKVPSKKFKVLGNTDRHSIKKNLIGALLFDSGETAEATRLKRTARRRYTRRKNRICYLQEIFSNEMAKVDDSFFHRLEESFLVEEDKKHERHPIFGNIVDEVAYHEKYPTIYHLRKKLVDSTDKADLRLIYLALAHMIKFRGHFLIEGDLNPDNSDVDKLFIQLVQTYNQLFEENPINASGVDAKAILSARLSKSRRLENLIAQLPGEKKNGLFGNLIALSLGLTPNFKSNFDLAEDAKLQLSKDTYDDDLDNLLAQIGDQYADLFLAAKNLSDAILLSDILRVNTEITKAPLSASMIKRYDEHHQDLTLLKALVRQQLPEKYKEIFFDQSKNGYAGYIDGGASQEEFYKFIKPILEKMDGTEELLVKLNREDLLRKQRTFDNGSIPHQIHLGELHAILRRQEDFYPFLKDNREKIEKILTFRIPYYVGPLARGNSRFAWMTRKSEETITPWNFEEVVDKGASAQSFIERMTNFDKNLPNEKVLPKHSLLYEYFTVYNELTKVKYVTEGMRKPAFLSGEQKKAIVDLLFKTNRKVTVKQLKEDYFKKIECFDSVEISGVEDRFNASLGTYHDLLKIIKDKDFLDNEENEDILEDIVLTLTLFEDREMIEERLKTYAHLFDDKVMKQLKRRRYTGWGRLSRKLINGIRDKQSGKTILDFLKSDGFANRNFMQLIHDDSLTFKEDIQKAQVSGQGDSLHEHIANLAGSPAIKKGILQTVKVVDELVKVMGRHKPENIVIEMARENQTTQKGQKNSRERMKRIEEGIKELGSQILKEHPVENTQLQNEKLYLYYLQNGRDMYVDQELDINRLSDYDVDHIVPQSFLKDDSIDNKVLTRSDKNRGKSDNVPSEEVVKKMKNYWRQLLNAKLITQRKFDNLTKAERGGLSELDKAGFIKRQLVETRQITKHVAQILDSRMNTKYDENDKLIREVKVITLKSKLVSDFRKDFQFYKVREINNYHHAHXAYLNAVVGTALIKKYPKLESEFVYGDYKVYDVRKMIAKSEQEIGKATAKYFFYSNIMNFFKTEITLANGEIRKRPLIETNGETGEIVWDKGRDFATVRKVLSMPQVNIVKKTEVQTGGFSKESILPKRNSDKLIARKKDWDPKKYGGFDSPTVAYSVLVVAKVEKGKSKKLKSVKELLGITIMERSSFEKNPIDFLEAKGYKEVKKDLIIKLPKYSLFELENGRKRMLASAGELQKGNELALPSKYVNFLYLASHYEKLKGSPEDNEQKQLFVEQHKHYLDEIIEQISEFSKRVILADANLDKVLSAYNKHRDKPIREQAENIIHLFTLTNLGAPAAFKYFDTTIDRKRYTSTKEVLDATLIHQSITGLYETRIDLSQLGGD

SEQ ID NO: 46 - protein, 1368 aa, Streptococcus pyogenes
MDKKYSIGLAIGTNSVGWAVITDEYKVPSKKFKVLGNTDRHSIKKNLIGALLFDSGETAEATRLKRTARRRYTRRKNRICYLQEIFSNEMAKVDDSFFHRLEESFLVEEDKKHERHPIFGNIVDEVAYHEKYPTIYHLRKKLVDSTDKADLRLIYLALAHMIKFRGHFLIEGDLNPDNSDVDKLFIQLVQTYNQLFEENPINASGVDAKAILSARLSKSRRLENLIAQLPGEKKNGLFGNLIALSLGLTPNFKSNFDLAEDAKLQLSKDTYDDDLDNLLAQIGDQYADLFLAAKNLSDAILLSDILRVNTEITKAPLSASMIKRYDEHHQDLTLLKALVRQQLPEKYKEIFFDQSKNGYAGYIDGGASQEEFYKFIKPILEKMDGTEELLVKLNREDLLRKQRTFDNGSIPHQIHLGELHAILRRQEDFYPFLKDNREKIEKILTFRIPYYVGPLARGNSRFAWMTRKSEETITPWNFEEVVDKGASAQSFIERMTNFDKNLPNEKVLPKHSLLYEYFTVYNELTKVKYVTEGMRKPAFLSGEQKKAIVDLLFKTNRKVTVKQLKEDYFKKIECFDSVEISGVEDRFNASLGTYHDLLKIIKDKDFLDNEENEDILEDIVLTLTLFEDREMIEERLKTYAHLFDDKVMKQLKRRRYTGWGRLSRKLINGIRDKQSGKTILDFLKSDGFANRNFMQLIHDDSLTFKEDIQKAQVSGQGDSLHEHIANLAGSPAIKKGILQTVKVVDELVKVMGRHKPENIVIEMARENQTTQKGQKNSRERMKRIEEGIKELGSQILKEHPVENTQLQNEKLYLYYLQNGRDMYVDQELDINRLSDYDVDHIVPQSFLKDDSIDNKVLTRSDKNRGKSDNVPSEEVVKKMKNYWRQLLNAKLITQRKFDNLTKAERGGLSELDKAGFIKRQLVETRQITKHVAQILDSRMNTKYDENDKLIREVKVITLKSKLVSDFRKDFQFYKVREINNYHHAHDAYLNAVVGTALIKKYPKLESEFVYGDYKVYDVRKMIAKSEQEIGKATAKYFFYSNIMNFFKTEITLANGEIRKRPLIETNGETGEIVWDKGRDFATVRKVLSMPQVNIVKKTEVQTGGFSKESILPKRNSDKLIARKKDWDPKKYGGFDSPTVAYSVLVVAKVEKGKSKKLKSVKELLGITIMERSSFEKNPIDFLEAKGYKEVKKDLIIKLPKYSLFELENGRKRMLASAGELQKGNELALPSKYVNFLYLASHYEKLKGSPEDNEQKQLFVEQHKHYLDEIIEQISEFSKRVILADANLDKVLSAYNKHRDKPIREQAENIIHLFTLTNLGAPAAFKYFDTTIDRKRYTSTKEVLDATLIHQSITGLYETRIDLSQLGGD

SEQ ID NO: 47 - protein, 1368 aa, Streptococcus pyogenes
MDKKYSIGLDIGTNSVGWAVITDEYKVPSKKFKVLGNTDRHSIKKNLIGALLFDSGETAEATRLKRTARRRYTRRKNRICYLQEIFSNEMAKVDDSFFHRLEESFLVEEDKKHERHPIFGNIVDEVAYHEKYPTIYHLRKKLVDSTDKADLRLIYLALAHMIKFRGHFLIEGDLNPDNSDVDKLFIQLVQTYNQLFEENPINASGVDAKAILSARLSKSRRLENLIAQLPGEKKNGLFGNLIALSLGLTPNFKSNFDLAEDAKLQLSKDTYDDDLDNLLAQIGDQYADLFLAAKNLSDAILLSDILRVNTEITKAPLSASMIKRYDEHHQDLTLLKALVRQQLPEKYKEIFFDQSKNGYAGYIDGGASQEEFYKFIKPILEKMDGTEELLVKLNREDLLRKQRTFDNGSIPHQIHLGELHAILRRQEDFYPFLKDNREKIEKILTFRIPYYVGPLARGNSRFAWMTRKSEETITPWNFEEVVDKGASAQSFIERMTNFDKNLPNEKVLPKHSLLYEYFTVYNELTKVKYVTEGMRKPAFLSGEQKKAIVDLLFKTNRKVTVKQLKEDYFKKIECFDSVEISGVEDRFNASLGTYHDLLKIIKDKDFLDNEENEDILEDIVLTLTLFEDREMIEERLKTYAHLFDDKVMKQLKRRRYTGWGRLSRKLINGIRDKQSGKTILDFLKSDGFANRNFMQLIHDDSLTFKEDIQKAQVSGQGDSLHEHIANLAGSPAIKKGILQTVKVVDELVKVMGRHKPENIVIAMARENQTTQKGQKNSRERMKRIEEGIKELGSQILKEHPVENTQLQNEKLYLYYLQNGRDMYVDQELDINRLSDYDVDHIVPQSFLKDDSIDNKVLTRSDKNRGKSDNVPSEEVVKKMKNYWRQLLNAKLITQRKFDNLTKAERGGLSELDKAGFIKRQLVETRQITKHVAQILDSRMNTKYDENDKLIREVKVITLKSKLVSDFRKDFQFYKVREINNYHHAHDAYLNAVVGTALIKKYPKLESEFVYGDYKVYDVRKMIAKSEQEIGKATAKYFFYSNIMNFFKTEITLANGEIRKRPLIETNGETGEIVWDKGRDFATVRKVLSMPQVNIVKKTEVQTGGFSKESILPKRNSDKLIARKKDWDPKKYGGFDSPTVAYSVLVVAKVEKGKSKKLKSVKELLGITIMERSSFEKNPIDFLEAKGYKEVKKDLIIKLPKYSLFELENGRKRMLASAGELQKGNELALPSKYVNFLYLASHYEKLKGSPEDNEQKQLFVEQHKHYLDEIIEQISEFSKRVILADANLDKVLSAYNKHRDKPIREQAENIIHLFTLTNLGAPAAFKYFDTTIDRKRYTSTKEVLDATLIHQSITGLYETRIDLSQLGGD

SEQ ID NO: 48 - protein, 1368 aa, Streptococcus pyogenes
MDKKYSIGLDIGTNSVGWAVITDEYKVPSKKFKVLGNTDRHSIKKNLIGALLFDSGETAEATRLKRTARRRYTRRKNRICYLQEIFSNEMAKVDDSFFHRLEESFLVEEDKKHERHPIFGNIVDEVAYHEKYPTIYHLRKKLVDSTDKADLRLIYLALAHMIKFRGHFLIEGDLNPDNSDVDKLFIQLVQTYNQLFEENPINASGVDAKAILSARLSKSRRLENLIAQLPGEKKNGLFGNLIALSLGLTPNFKSNFDLAEDAKLQLSKDTYDDDLDNLLAQIGDQYADLFLAAKNLSDAILLSDILRVNTEITKAPLSASMIKRYDEHHQDLTLLKALVRQQLPEKYKEIFFDQSKNGYAGYIDGGASQEEFYKFIKPILEKMDGTEELLVKLNREDLLRKQRTFDNGSIPHQIHLGELHAILRRQEDFYPFLKDNREKIEKILTFRIPYYVGPLARGNSRFAWMTRKSEETITPWNFEEVVDKGASAQSFIERMTNFDKNLPNEKVLPKHSLLYEYFTVYNELTKVKYVTEGMRKPAFLSGEQKKAIVDLLFKTNRKVTVKQLKEDYFKKIECFDSVEISGVEDRFNASLGTYHDLLKIIKDKDFLDNEENEDILEDIVLTLTLFEDREMIEERLKTYAHLFDDKVMKQLKRRRYTGWGRLSRKLINGIRDKQSGKTILDFLKSDGFANRNFMQLIHDDSLTFKEDIQKAQVSGQGDSLHEHIANLAGSPAIKKGILQTVKVVDELVKVMGRHKPENIVIEMARENQTTQKGQKNSRERMKRIEEGIKELGSQILKEHPVENTQLQNEKLYLYYLQNGRDMYVDQELDINRLSDYDVDHIVPQSFLKDDSIDNKVLTRSDKNRGKSDNVPSEEVVKKMKNYWRQLLNAKLITQRKFDNLTKAERGGLSELDKAGFIKRQLVETRQITKHVAQILDSRMNTKYDENDKLIREVKVITLKSKLVSDFRKDFQFYKVREINNYHAAHDAYLNAVVGTALIKKYPKLESEFVYGDYKVYDVRKMIAKSEQEIGKATAKYFFYSNIMNFFKTEITLANGEIRKRPLIETNGETGEIVWDKGRDFATVRKVLSMPQVNIVKKTEVQTGGFSKESILPKRNSDKLIARKKDWDPKKYGGFDSPTVAYSVLVVAKVEKGKSKKLKSVKELLGITIMERSSFEKNPIDFLEAKGYKEVKKDLIIKLPKYSLFELENGRKRMLASAGELQKGNELALPSKYVNFLYLASHYEKLKGSPEDNEQKQLFVEQHKHYLDEIIEQISEFSKRVILADANLDKVLSAYNKHRDKPIREQAENIIHLFTLTNLGAPAAFKYFDTTIDRKRYTSTKEVLDATLIHQSITGLYETRIDLSQLGGD

SEQ ID NO: 49 - protein, 1368 aa, Streptococcus pyogenes
MDKKYSIGLDIGTNSVGWAVITDEYKVPSKKFKVLGNTDRHSIKKNLIGALLFDSGETAEATRLKRTARRRYTRRKNRICYLQEIFSNEMAKVDDSFFHRLEESFLVEEDKKHERHPIFGNIVDEVAYHEKYPTIYHLRKKLVDSTDKADLRLIYLALAHMIKFRGHFLIEGDLNPDNSDVDKLFIQLVQTYNQLFEENPINASGVDAKAILSARLSKSRRLENLIAQLPGEKKNGLFGNLIALSLGLTPNFKSNFDLAEDAKLQLSKDTYDDDLDNLLAQIGDQYADLFLAAKNLSDAILLSDILRVNTEITKAPLSASMIKRYDEHHQDLTLLKALVRQQLPEKYKEIFFDQSKNGYAGYIDGGASQEEFYKFIKPILEKMDGTEELLVKLNREDLLRKQRTFDNGSIPHQIHLGELHAILRRQEDFYPFLKDNREKIEKILTFRIPYYVGPLARGNSRFAWMTRKSEETITPWNFEEVVDKGASAQSFIERMTNFDKNLPNEKVLPKHSLLYEYFTVYNELTKVKYVTEGMRKPAFLSGEQKKAIVDLLFKTNRKVTVKQLKEDYFKKIECFDSVEISGVEDRFNASLGTYHDLLKIIKDKDFLDNEENEDILEDIVLTLTLFEDREMIEERLKTYAHLFDDKVMKQLKRRRYTGWGRLSRKLINGIRDKQSGKTILDFLKSDGFANRNFMQLIHDDSLTFKEDIQKAQVSGQGDSLHEHIANLAGSPAIKKGILQTVKVVDELVKVMGRHKPENIVIEMARENQTTQKGQKNSRERMKRIEEGIKELGSQILKEHPVENTQLQNEKLYLYYLQNGRDMYVDQELDINRLSDYDVDHIVPQSFLKDDSIDNKVLTRSDKNRGKSDNVPSEEVVKKMKNYWRQLLNAKLITQRKFDNLTKAERGGLSELDKAGFIKRQLVETRQITKHVAQILDSRMNTKYDENDKLIREVKVITLKSKLVSDFRKDFQFYKVREINNYHHAHAAYLNAVVGTALIKKYPKLESEFVYGDYKVYDVRKMIAKSEQEIGKATAKYFFYSNIMNFFKTEITLANGEIRKRPLIETNGETGEIVWDKGRDFATVRKVLSMPQVNIVKKTEVQTGGFSKESILPKRNSDKLIARKKDWDPKKYGGFDSPTVAYSVLVVAKVEKGKSKKLKSVKELLGITIMERSSFEKNPIDFLEAKGYKEVKKDLIIKLPKYSLFELENGRKRMLASAGELQKGNELALPSKYVNFLYLASHYEKLKGSPEDNEQKQLFVEQHKHYLDEIIEQISEFSKRVILADANLDKVLSAYNKHRDKPIREQAENIIHLFTLTNLGAPAAFKYFDTTIDRKRYTSTKEVLDATLIHQSITGLYETRIDLSQLGGD

SEQ ID NO: 50 - protein, 1368 aa, Streptococcus pyogenes
  SITE (840)..(840): Xaa can be any naturally occurring amino acid
MDKKYSIGLDIGTNSVGWAVITDEYKVPSKKFKVLGNTDRHSIKKNLIGALLFDSGETAEATRLKRTARRRYTRRKNRICYLQEIFSNEMAKVDDSFFHRLEESFLVEEDKKHERHPIFGNIVDEVAYHEKYPTIYHLRKKLVDSTDKADLRLIYLALAHMIKFRGHFLIEGDLNPDNSDVDKLFIQLVQTYNQLFEENPINASGVDAKAILSARLSKSRRLENLIAQLPGEKKNGLFGNLIALSLGLTPNFKSNFDLAEDAKLQLSKDTYDDDLDNLLAQIGDQYADLFLAAKNLSDAILLSDILRVNTEITKAPLSASMIKRYDEHHQDLTLLKALVRQQLPEKYKEIFFDQSKNGYAGYIDGGASQEEFYKFIKPILEKMDGTEELLVKLNREDLLRKQRTFDNGSIPHQIHLGELHAILRRQEDFYPFLKDNREKIEKILTFRIPYYVGPLARGNSRFAWMTRKSEETITPWNFEEVVDKGASAQSFIERMTNFDKNLPNEKVLPKHSLLYEYFTVYNELTKVKYVTEGMRKPAFLSGEQKKAIVDLLFKTNRKVTVKQLKEDYFKKIECFDSVEISGVEDRFNASLGTYHDLLKIIKDKDFLDNEENEDILEDIVLTLTLFEDREMIEERLKTYAHLFDDKVMKQLKRRRYTGWGRLSRKLINGIRDKQSGKTILDFLKSDGFANRNFMQLIHDDSLTFKEDIQKAQVSGQGDSLHEHIANLAGSPAIKKGILQTVKVVDELVKVMGRHKPENIVIEMARENQTTQKGQKNSRERMKRIEEGIKELGSQILKEHPVENTQLQNEKLYLYYLQNGRDMYVDQELDINRLSDYDVDXIVPQSFLKDDSIDNKVLTRSDKNRGKSDNVPSEEVVKKMKNYWRQLLNAKLITQRKFDNLTKAERGGLSELDKAGFIKRQLVETRQITKHVAQILDSRMNTKYDENDKLIREVKVITLKSKLVSDFRKDFQFYKVREINNYHHAHDAYLNAVVGTALIKKYPKLESEFVYGDYKVYDVRKMIAKSEQEIGKATAKYFFYSNIMNFFKTEITLANGEIRKRPLIETNGETGEIVWDKGRDFATVRKVLSMPQVNIVKKTEVQTGGFSKESILPKRNSDKLIARKKDWDPKKYGGFDSPTVAYSVLVVAKVEKGKSKKLKSVKELLGITIMERSSFEKNPIDFLEAKGYKEVKKDLIIKLPKYSLFELENGRKRMLASAGELQKGNELALPSKYVNFLYLASHYEKLKGSPEDNEQKQLFVEQHKHYLDEIIEQISEFSKRVILADANLDKVLSAYNKHRDKPIREQAENIIHLFTLTNLGAPAAFKYFDTTIDRKRYTSTKEVLDATLIHQSITGLYETRIDLSQLGGD

SEQ ID NO: 51 - protein, 1368 aa, Streptococcus pyogenes
MDKKYSIGLDIGTNSVGWAVITDEYKVPSKKFKVLGNTDRHSIKKNLIGALLFDSGETAEATRLKRTARRRYTRRKNRICYLQEIFSNEMAKVDDSFFHRLEESFLVEEDKKHERHPIFGNIVDEVAYHEKYPTIYHLRKKLVDSTDKADLRLIYLALAHMIKFRGHFLIEGDLNPDNSDVDKLFIQLVQTYNQLFEENPINASGVDAKAILSARLSKSRRLENLIAQLPGEKKNGLFGNLIALSLGLTPNFKSNFDLAEDAKLQLSKDTYDDDLDNLLAQIGDQYADLFLAAKNLSDAILLSDILRVNTEITKAPLSASMIKRYDEHHQDLTLLKALVRQQLPEKYKEIFFDQSKNGYAGYIDGGASQEEFYKFIKPILEKMDGTEELLVKLNREDLLRKQRTFDNGSIPHQIHLGELHAILRRQEDFYPFLKDNREKIEKILTFRIPYYVGPLARGNSRFAWMTRKSEETITPWNFEEVVDKGASAQSFIERMTNFDKNLPNEKVLPKHSLLYEYFTVYNELTKVKYVTEGMRKPAFLSGEQKKAIVDLLFKTNRKVTVKQLKEDYFKKIECFDSVEISGVEDRFNASLGTYHDLLKIIKDKDFLDNEENEDILEDIVLTLTLFEDREMIEERLKTYAHLFDDKVMKQLKRRRYTGWGRLSRKLINGIRDKQSGKTILDFLKSDGFANRNFMQLIHDDSLTFKEDIQKAQVSGQGDSLHEHIANLAGSPAIKKGILQTVKVVDELVKVMGRHKPENIVIEMARENQTTQKGQKNSRERMKRIEEGIKELGSQILKEHPVENTQLQNEKLYLYYLQNGRDMYVDQELDINRLSDYDVDAIVPQSFLKDDSIDNKVLTRSDKNRGKSDNVPSEEVVKKMKNYWRQLLNAKLITQRKFDNLTKAERGGLSELDKAGFIKRQLVETRQITKHVAQILDSRMNTKYDENDKLIREVKVITLKSKLVSDFRKDFQFYKVREINNYHHAHDAYLNAVVGTALIKKYPKLESEFVYGDYKVYDVRKMIAKSEQEIGKATAKYFFYSNIMNFFKTEITLANGEIRKRPLIETNGETGEIVWDKGRDFATVRKVLSMPQVNIVKKTEVQTGGFSKESILPKRNSDKLIARKKDWDPKKYGGFDSPTVAYSVLVVAKVEKGKSKKLKSVKELLGITIMERSSFEKNPIDFLEAKGYKEVKKDLIIKLPKYSLFELENGRKRMLASAGELQKGNELALPSKYVNFLYLASHYEKLKGSPEDNEQKQLFVEQHKHYLDEIIEQISEFSKRVILADANLDKVLSAYNKHRDKPIREQAENIIHLFTLTNLGAPAAFKYFDTTIDRKRYTSTKEVLDATLIHQSITGLYETRIDLSQLGGD

SEQ ID NO: 52 - protein, 1368 aa, Streptococcus pyogenes
  SITE (864)..(864): Xaa can be any naturally occurring amino acid
MDKKYSIGLDIGTNSVGWAVITDEYKVPSKKFKVLGNTDRHSIKKNLIGALLFDSGETAEATRLKRTARRRYTRRKNRICYLQEIFSNEMAKVDDSFFHRLEESFLVEEDKKHERHPIFGNIVDEVAYHEKYPTIYHLRKKLVDSTDKADLRLIYLALAHMIKFRGHFLIEGDLNPDNSDVDKLFIQLVQTYNQLFEENPINASGVDAKAILSARLSKSRRLENLIAQLPGEKKNGLFGNLIALSLGLTPNFKSNFDLAEDAKLQLSKDTYDDDLDNLLAQIGDQYADLFLAAKNLSDAILLSDILRVNTEITKAPLSASMIKRYDEHHQDLTLLKALVRQQLPEKYKEIFFDQSKNGYAGYIDGGASQEEFYKFIKPILEKMDGTEELLVKLNREDLLRKQRTFDNGSIPHQIHLGELHAILRRQEDFYPFLKDNREKIEKILTFRIPYYVGPLARGNSRFAWMTRKSEETITPWNFEEVVDKGASAQSFIERMTNFDKNLPNEKVLPKHSLLYEYFTVYNELTKVKYVTEGMRKPAFLSGEQKKAIVDLLFKTNRKVTVKQLKEDYFKKIECFDSVEISGVEDRFNASLGTYHDLLKIIKDKDFLDNEENEDILEDIVLTLTLFEDREMIEERLKTYAHLFDDKVMKQLKRRRYTGWGRLSRKLINGIRDKQSGKTILDFLKSDGFANRNFMQLIHDDSLTFKEDIQKAQVSGQGDSLHEHIANLAGSPAIKKGILQTVKVVDELVKVMGRHKPENIVIEMARENQTTQKGQKNSRERMKRIEEGIKELGSQILKEHPVENTQLQNEKLYLYYLQNGRDMYVDQELDINRLSDYDVDHIVPQSFLKDDSIDNKVLTRSDKNXGKSDNVPSEEVVKKMKNYWRQLLNAKLITQRKFDNLTKAERGGLSELDKAGFIKRQLVETRQITKHVAQILDSRMNTKYDENDKLIREVKVITLKSKLVSDFRKDFQFYKVREINNYHHAHDAYLNAVVGTALIKKYPKLESEFVYGDYKVYDVRKMIAKSEQEIGKATAKYFFYSNIMNFFKTEITLANGEIRKRPLIETNGETGEIVWDKGRDFATVRKVLSMPQVNIVKKTEVQTGGFSKESILPKRNSDKLIARKKDWDPKKYGGFDSPTVAYSVLVVAKVEKGKSKKLKSVKELLGITIMERSSFEKNPIDFLEAKGYKEVKKDLIIKLPKYSLFELENGRKRMLASAGELQKGNELALPSKYVNFLYLASHYEKLKGSPEDNEQKQLFVEQHKHYLDEIIEQISEFSKRVILADANLDKVLSAYNKHRDKPIREQAENIIHLFTLTNLGAPAAFKYFDTTIDRKRYTSTKEVLDATLIHQSITGLYETRIDLSQLGGD

SEQ ID NO: 53 - protein, 1368 aa, Streptococcus pyogenes
MDKKYSIGLDIGTNSVGWAVITDEYKVPSKKFKVLGNTDRHSIKKNLIGALLFDSGETAEATRLKRTARRRYTRRKNRICYLQEIFSNEMAKVDDSFFHRLEESFLVEEDKKHERHPIFGNIVDEVAYHEKYPTIYHLRKKLVDSTDKADLRLIYLALAHMIKFRGHFLIEGDLNPDNSDVDKLFIQLVQTYNQLFEENPINASGVDAKAILSARLSKSRRLENLIAQLPGEKKNGLFGNLIALSLGLTPNFKSNFDLAEDAKLQLSKDTYDDDLDNLLAQIGDQYADLFLAAKNLSDAILLSDILRVNTEITKAPLSASMIKRYDEHHQDLTLLKALVRQQLPEKYKEIFFDQSKNGYAGYIDGGASQEEFYKFIKPILEKMDGTEELLVKLNREDLLRKQRTFDNGSIPHQIHLGELHAILRRQEDFYPFLKDNREKIEKILTFRIPYYVGPLARGNSRFAWMTRKSEETITPWNFEEVVDKGASAQSFIERMTNFDKNLPNEKVLPKHSLLYEYFTVYNELTKVKYVTEGMRKPAFLSGEQKKAIVDLLFKTNRKVTVKQLKEDYFKKIECFDSVEISGVEDRFNASLGTYHDLLKIIKDKDFLDNEENEDILEDIVLTLTLFEDREMIEERLKTYAHLFDDKVMKQLKRRRYTGWGRLSRKLINGIRDKQSGKTILDFLKSDGFANRNFMQLIHDDSLTFKEDIQKAQVSGQGDSLHEHIANLAGSPAIKKGILQTVKVVDELVKVMGRHKPENIVIEMARENQTTQKGQKNSRERMKRIEEGIKELGSQILKEHPVENTQLQNEKLYLYYLQNGRDMYVDQELDINRLSDYDVDHIVPQSFLKDDSIDNKVLTRSDKNAGKSDNVPSEEVVKKMKNYWRQLLNAKLITQRKFDNLTKAERGGLSELDKAGFIKRQLVETRQITKHVAQILDSRMNTKYDENDKLIREVKVITLKSKLVSDFRKDFQFYKVREINNYHHAHDAYLNAVVGTALIKKYPKLESEFVYGDYKVYDVRKMIAKSEQEIGKATAKYFFYSNIMNFFKTEITLANGEIRKRPLIETNGETGEIVWDKGRDFATVRKVLSMPQVNIVKKTEVQTGGFSKESILPKRNSDKLIARKKDWDPKKYGGFDSPTVAYSVLVVAKVEKGKSKKLKSVKELLGITIMERSSFEKNPIDFLEAKGYKEVKKDLIIKLPKYSLFELENGRKRMLASAGELQKGNELALPSKYVNFLYLASHYEKLKGSPEDNEQKQLFVEQHKHYLDEIIEQISEFSKRVILADANLDKVLSAYNKHRDKPIREQAENIIHLFTLTNLGAPAAFKYFDTTIDRKRYTSTKEVLDATLIHQSITGLYETRIDLSQLGGD

SEQ ID NO: 54 - protein, 1367 aa, Streptococcus pyogenes
  SITE (839)..(839): Xaa can be any naturally occurring amino acid
DKKYSIGLDIGTNSVGWAVITDEYKVPSKKFKVLGNTDRHSIKKNLIGALLFDSGETAEATRLKRTARRRYTRRKNRICYLQEIFSNEMAKVDDSFFHRLEESFLVEEDKKHERHPIFGNIVDEVAYHEKYPTIYHLRKKLVDSTDKADLRLIYLALAHMIKFRGHFLIEGDLNPDNSDVDKLFIQLVQTYNQLFEENPINASGVDAKAILSARLSKSRRLENLIAQLPGEKKNGLFGNLIALSLGLTPNFKSNFDLAEDAKLQLSKDTYDDDLDNLLAQIGDQYADLFLAAKNLSDAILLSDILRVNTEITKAPLSASMIKRYDEHHQDLTLLKALVRQQLPEKYKEIFFDQSKNGYAGYIDGGASQEEFYKFIKPILEKMDGTEELLVKLNREDLLRKQRTFDNGSIPHQIHLGELHAILRRQEDFYPFLKDNREKIEKILTFRIPYYVGPLARGNSRFAWMTRKSEETITPWNFEEVVDKGASAQSFIERMTNFDKNLPNEKVLPKHSLLYEYFTVYNELTKVKYVTEGMRKPAFLSGEQKKAIVDLLFKTNRKVTVKQLKEDYFKKIECFDSVEISGVEDRFNASLGTYHDLLKIIKDKDFLDNEENEDILEDIVLTLTLFEDREMIEERLKTYAHLFDDKVMKQLKRRRYTGWGRLSRKLINGIRDKQSGKTILDFLKSDGFANRNFMQLIHDDSLTFKEDIQKAQVSGQGDSLHEHIANLAGSPAIKKGILQTVKVVDELVKVMGRHKPENIVIEMARENQTTQKGQKNSRERMKRIEEGIKELGSQILKEHPVENTQLQNEKLYLYYLQNGRDMYVDQELDINRLSDYDVDXIVPQSFLKDDSIDNKVLTRSDKNRGKSDNVPSEEVVKKMKNYWRQLLNAKLITQRKFDNLTKAERGGLSELDKAGFIKRQLVETRQITKHVAQILDSRMNTKYDENDKLIREVKVITLKSKLVSDFRKDFQFYKVREINNYHHAHDAYLNAVVGTALIKKYPKLESEFVYGDYKVYDVRKMIAKSEQEIGKATAKYFFYSNIMNFFKTEITLANGEIRKRPLIETNGETGEIVWDKGRDFATVRKVLSMPQVNIVKKTEVQTGGFSKESILPKRNSDKLIARKKDWDPKKYGGFDSPTVAYSVLVVAKVEKGKSKKLKSVKELLGITIMERSSFEKNPIDFLEAKGYKEVKKDLIIKLPKYSLFELENGRKRMLASAGELQKGNELALPSKYVNFLYLASHYEKLKGSPEDNEQKQLFVEQHKHYLDEIIEQISEFSKRVILADANLDKVLSAYNKHRDKPIREQAENIIHLFTLTNLGAPAAFKYFDTTIDRKRYTSTKEVLDATLIHQSITGLYETRIDLSQLGGD

SEQ ID NO: 55 - protein, 1367 aa, Streptococcus pyogenes
DKKYSIGLDIGTNSVGWAVITDEYKVPSKKFKVLGNTDRHSIKKNLIGALLFDSGETAEATRLKRTARRRYTRRKNRICYLQEIFSNEMAKVDDSFFHRLEESFLVEEDKKHERHPIFGNIVDEVAYHEKYPTIYHLRKKLVDSTDKADLRLIYLALAHMIKFRGHFLIEGDLNPDNSDVDKLFIQLVQTYNQLFEENPINASGVDAKAILSARLSKSRRLENLIAQLPGEKKNGLFGNLIALSLGLTPNFKSNFDLAEDAKLQLSKDTYDDDLDNLLAQIGDQYADLFLAAKNLSDAILLSDILRVNTEITKAPLSASMIKRYDEHHQDLTLLKALVRQQLPEKYKEIFFDQSKNGYAGYIDGGASQEEFYKFIKPILEKMDGTEELLVKLNREDLLRKQRTFDNGSIPHQIHLGELHAILRRQEDFYPFLKDNREKIEKILTFRIPYYVGPLARGNSRFAWMTRKSEETITPWNFEEVVDKGASAQSFIERMTNFDKNLPNEKVLPKHSLLYEYFTVYNELTKVKYVTEGMRKPAFLSGEQKKAIVDLLFKTNRKVTVKQLKEDYFKKIECFDSVEISGVEDRFNASLGTYHDLLKIIKDKDFLDNEENEDILEDIVLTLTLFEDREMIEERLKTYAHLFDDKVMKQLKRRRYTGWGRLSRKLINGIRDKQSGKTILDFLKSDGFANRNFMQLIHDDSLTFKEDIQKAQVSGQGDSLHEHIANLAGSPAIKKGILQTVKVVDELVKVMGRHKPENIVIEMARENQTTQKGQKNSRERMKRIEEGIKELGSQILKEHPVENTQLQNEKLYLYYLQNGRDMYVDQELDINRLSDYDVDAIVPQSFLKDDSIDNKVLTRSDKNRGKSDNVPSEEVVKKMKNYWRQLLNAKLITQRKFDNLTKAERGGLSELDKAGFIKRQLVETRQITKHVAQILDSRMNTKYDENDKLIREVKVITLKSKLVSDFRKDFQFYKVREINNYHHAHDAYLNAVVGTALIKKYPKLESEFVYGDYKVYDVRKMIAKSEQEIGKATAKYFFYSNIMNFFKTEITLANGEIRKRPLIETNGETGEIVWDKGRDFATVRKVLSMPQVNIVKKTEVQTGGFSKESILPKRNSDKLIARKKDWDPKKYGGFDSPTVAYSVLVVAKVEKGKSKKLKSVKELLGITIMERSSFEKNPIDFLEAKGYKEVKKDLIIKLPKYSLFELENGRKRMLASAGELQKGNELALPSKYVNFLYLASHYEKLKGSPEDNEQKQLFVEQHKHYLDEIIEQISEFSKRVILADANLDKVLSAYNKHRDKPIREQAENIIHLFTLTNLGAPAAFKYFDTTIDRKRYTSTKEVLDATLIHQSITGLYETRIDLSQLGGD

SEQ ID NO: 56 - protein, 1367 aa, Streptococcus pyogenes
  SITE (863)..(863): Xaa can be any naturally occurring amino acid
DKKYSIGLDIGTNSVGWAVITDEYKVPSKKFKVLGNTDRHSIKKNLIGALLFDSGETAEATRLKRTARRRYTRRKNRICYLQEIFSNEMAKVDDSFFHRLEESFLVEEDKKHERHPIFGNIVDEVAYHEKYPTIYHLRKKLVDSTDKADLRLIYLALAHMIKFRGHFLIEGDLNPDNSDVDKLFIQLVQTYNQLFEENPINASGVDAKAILSARLSKSRRLENLIAQLPGEKKNGLFGNLIALSLGLTPNFKSNFDLAEDAKLQLSKDTYDDDLDNLLAQIGDQYADLFLAAKNLSDAILLSDILRVNTEITKAPLSASMIKRYDEHHQDLTLLKALVRQQLPEKYKEIFFDQSKNGYAGYIDGGASQEEFYKFIKPILEKMDGTEELLVKLNREDLLRKQRTFDNGSIPHQIHLGELHAILRRQEDFYPFLKDNREKIEKILTFRIPYYVGPLARGNSRFAWMTRKSEETITPWNFEEVVDKGASAQSFIERMTNFDKNLPNEKVLPKHSLLYEYFTVYNELTKVKYVTEGMRKPAFLSGEQKKAIVDLLFKTNRKVTVKQLKEDYFKKIECFDSVEISGVEDRFNASLGTYHDLLKIIKDKDFLDNEENEDILEDIVLTLTLFEDREMIEERLKTYAHLFDDKVMKQLKRRRYTGWGRLSRKLINGIRDKQSGKTILDFLKSDGFANRNFMQLIHDDSLTFKEDIQKAQVSGQGDSLHEHIANLAGSPAIKKGILQTVKVVDELVKVMGRHKPENIVIEMARENQTTQKGQKNSRERMKRIEEGIKELGSQILKEHPVENTQLQNEKLYLYYLQNGRDMYVDQELDINRLSDYDVDHIVPQSFLKDDSIDNKVLTRSDKNXGKSDNVPSEEVVKKMKNYWRQLLNAKLITQRKFDNLTKAERGGLSELDKAGFIKRQLVETRQITKHVAQILDSRMNTKYDENDKLIREVKVITLKSKLVSDFRKDFQFYKVREINNYHHAHDAYLNAVVGTALIKKYPKLESEFVYGDYKVYDVRKMIAKSEQEIGKATAKYFFYSNIMNFFKTEITLANGEIRKRPLIETNGETGEIVWDKGRDFATVRKVLSMPQVNIVKKTEVQTGGFSKESILPKRNSDKLIARKKDWDPKKYGGFDSPTVAYSVLVVAKVEKGKSKKLKSVKELLGITIMERSSFEKNPIDFLEAKGYKEVKKDLIIKLPKYSLFELENGRKRMLASAGELQKGNELALPSKYVNFLYLASHYEKLKGSPEDNEQKQLFVEQHKHYLDEIIEQISEFSKRVILADANLDKVLSAYNKHRDKPIREQAENIIHLFTLTNLGAPAAFKYFDTTIDRKRYTSTKEVLDATLIHQSITGLYETRIDLSQLGGD

SEQ ID NO: 57 - protein, 1367 aa, Streptococcus pyogenes
DKKYSIGLDIGTNSVGWAVITDEYKVPSKKFKVLGNTDRHSIKKNLIGALLFDSGETAEATRLKRTARRRYTRRKNRICYLQEIFSNEMAKVDDSFFHRLEESFLVEEDKKHERHPIFGNIVDEVAYHEKYPTIYHLRKKLVDSTDKADLRLIYLALAHMIKFRGHFLIEGDLNPDNSDVDKLFIQLVQTYNQLFEENPINASGVDAKAILSARLSKSRRLENLIAQLPGEKKNGLFGNLIALSLGLTPNFKSNFDLAEDAKLQLSKDTYDDDLDNLLAQIGDQYADLFLAAKNLSDAILLSDILRVNTEITKAPLSASMIKRYDEHHQDLTLLKALVRQQLPEKYKEIFFDQSKNGYAGYIDGGASQEEFYKFIKPILEKMDGTEELLVKLNREDLLRKQRTFDNGSIPHQIHLGELHAILRRQEDFYPFLKDNREKIEKILTFRIPYYVGPLARGNSRFAWMTRKSEETITPWNFEEVVDKGASAQSFIERMTNFDKNLPNEKVLPKHSLLYEYFTVYNELTKVKYVTEGMRKPAFLSGEQKKAIVDLLFKTNRKVTVKQLKEDYFKKIECFDSVEISGVEDRFNASLGTYHDLLKIIKDKDFLDNEENEDILEDIVLTLTLFEDREMIEERLKTYAHLFDDKVMKQLKRRRYTGWGRLSRKLINGIRDKQSGKTILDFLKSDGFANRNFMQLIHDDSLTFKEDIQKAQVSGQGDSLHEHIANLAGSPAIKKGILQTVKVVDELVKVMGRHKPENIVIEMARENQTTQKGQKNSRERMKRIEEGIKELGSQILKEHPVENTQLQNEKLYLYYLQNGRDMYVDQELDINRLSDYDVDHIVPQSFLKDDSIDNKVLTRSDKNAGKSDNVPSEEVVKKMKNYWRQLLNAKLITQRKFDNLTKAERGGLSELDKAGFIKRQLVETRQITKHVAQILDSRMNTKYDENDKLIREVKVITLKSKLVSDFRKDFQFYKVREINNYHHAHDAYLNAVVGTALIKKYPKLESEFVYGDYKVYDVRKMIAKSEQEIGKATAKYFFYSNIMNFFKTEITLANGEIRKRPLIETNGETGEIVWDKGRDFATVRKVLSMPQVNIVKKTEVQTGGFSKESILPKRNSDKLIARKKDWDPKKYGGFDSPTVAYSVLVVAKVEKGKSKKLKSVKELLGITIMERSSFEKNPIDFLEAKGYKEVKKDLIIKLPKYSLFELENGRKRMLASAGELQKGNELALPSKYVNFLYLASHYEKLKGSPEDNEQKQLFVEQHKHYLDEIIEQISEFSKRVILADANLDKVLSAYNKHRDKPIREQAENIIHLFTLTNLGAPAAFKYFDTTIDRKRYTSTKEVLDATLIHQSITGLYETRIDLSQLGGD

SEQ ID NO: 58 - protein, 1053 aa, Staphylococcus aureus; identical to SEQ ID NO: 28

SEQ ID NO: 59 - protein, 1082 aa, N. meningitidis
MAAFKPNSINYILGLDIGIASVGWAMVEIDEEENPIRLIDLGVRVFERAEVPKTGDSLAMARRLARSVRRLTRRRAHRLLRTRRLLKREGVLQAANFDENGLIKSLPNTPWQLRAAALDRKLTPLEWSAVLLHLIKHRGYLSQRKNEGETADKELGALLKGVAGNAHALQTGDFRTPAELALNKFEKESGHIRNQRSDYSHTFSRKDLQAELILLFEKQKEFGNPHVSGGLKEGIETLLMTQRPALSGDAVQKMLGHCTFEPAEPKAAKNTYTAERFIWLTKLNNLRILEQGSERPLTDTERATLMDEPYRKSKLTYAQARKLLGLEDTAFFKGLRYGKDNAEASTLMEMKAYHAISRALEKEGLKDKKSPLNLSPELQDEIGTAFSLFKTDEDITGRLKDRIQPEILEALLKHISFDKFVQISLKALRRIVPLMEQGKRYDEACAEIYGDHYGKKNTEEKIYLPPIPADEIRNPVVLRALSQARKVINGVVRRYGSPARIHIETAREVGKSFKDRKEIEKRQEENRKDREKAAAKFREYFPNFVGEPKSKDILKLRLYEQQHGKCLYSGKEINLGRLNEKGYVEIDAALPFSRTWDDSFNNKVLVLGSENQNKGNQTPYEYFNGKDNSREWQEFKARVETSRFPRSKKQRILLQKFDEDGFKERNLNDTRYVNRFLCQFVADRMRLTGKGKKRVFASNGQITNLLRGFWGLRKVRAENDRHHALDAVVVACSTVAMQQKITRFVRYKEMNAFDGKTIDKETGEVLHQKTHFPQPWEFFAQEVMIRVFGKPDGKPEFEEADTLEKLRTLLAEKLSSRPEAVHEYVTPLFVSRAPNRKMSGQGHMETVKSAKRLDEGVSVLRVPLTQLKLKDLEKMVNREREPKLYEALKARLEAHKDDPAKAFAEPFYKYDKAGNRTQQVKAVRVEQVQKTGVWVRNHNGIADNATMVRVDVFEKGDKYYLVPIYSWQVAKGILPDRAVVQGKDEEDWQLIDDSFNFKFSLHPNDLVEVITKKARMFGYFASCHRGTGNINIRIHDLDHKIGKNGILEGIGVKTALSFQKYQIDELGKEIRPCRLKKRPPVR

SEQ ID NO: 60 - protein, 984 aa, C. jejuni
MARILAFDIGISSIGWAFSENDELKDCGVRIFTKVENPKTGESLALPRRLARSARKRLARRKARLNHLKHLIANEFKLNYEDYQSFDESLAKAYKGSLISPYELRFRALNELLSKQDFARVILHIAKRRGYDDIKNSDDKEKGAILKAIKQNEEKLANYQSVGEYLYKEYFQKFKENSKEFTNVRNKKESYERCIAQSFLKDELKLIFKKQREFGFSFSKKFEEEVLSVAFYKRALKDFSHLVGNCSFFTDEKRAPKNSPLAFMFVALTRIINLLNNLKNTEGILYTKDDLNALLNEVLKNGTLTYKQTKKLLGLSDDYEFKGEKGTYFIEFKKYKEFIKALGEHNLSQDDLNEIAKDITLIKDEIKLKKALAKYDLNQNQIDSLSKLEFKDHLNISFKALKLVTPLMLEGKKYDEACNELNLKVAINEDKKDFLPAFNETYYKDEVTNPVVLRAIKEYRKVLNALLKKYGKVHKINIELAREVGKNHSQRAKIEKEQNENYKAKKDAELECEKLGLKINSKNILKLRLFKEQKEFCAYSGEKIKISDLQDEKMLEIDHIYPYSRSFDDSYMNKVLVFTKQNQEKLNQTPFEAFGNDSAKWQKIEVLAKNLPTKKQKRILDKNYKDKEQKNFKDRNLNDTRYIARLVLNYTKDYLDFLPLSDDENTKLNDTQKGSKVHVEAKSGMLTSALRHTWGFSAKDRNNHLHHAIDAVIIAYANNSIVKAFSDFKKEQESNSAELYAKKISELDYKNKRKFFEPFSGFRQKVLDKIDEIFVSKPERKKPSGALHEETFRKEEEFYQSYGGKEGVLKALELGKIRKVNGKIVKNGDMFRVDIFKHKKTNKFYAVPIYTMDFALKVLPNKAVARSKKGEIKDWILMDENYEFCFSLYKDSLILIQTKDMQEPEFVYYNAFTSSTVSLIVSKHDNKFETLSKNQKILFKNANEKEVIAKSIGIQNLKVFEKYIVSALGEVTKAEFRQREDFKK

SEQ ID NO: 61 - protein, 1087 aa, G. stearothermophilus
MRYKIGLDIGITSVGWAVMNLDIPRIEDLGVRIFDRAENPQTGESLALPRRLARSARRRLRRRKHRLERIRRLVIREGILTKEELDKLFEEKHEIDVWQLRVEALDRKLNNDELARVLLHLAKRRGFKSNRKSERSNKENSTMLKHIEENRAILSSYRTVGEMIVKDPKFALHKRNKGENYTNTIARDDLEREIRLIFSKQREFGNMSCTEEFENEYITIWASQRPVASKDDIEKKVGFCTFEPKEKRAPKATYTFQSFIAWEHINKLRLISPSGARGLTDEERRLLYEQAFQKNKITYHDIRTLLHLPDDTYFKGIVYDRGESRKQNENIRFLELDAYHQIRKAVDKVYGKGKSSSFLPIDFDTFGYALTLFKDDADIHSYLRNEYEQNGKRMPNLANKVYDNELIEELLNLSFTKFGHLSLKALRSILPYMEQGEVYSSACERAGYTFTGPKKKQKTMLLPNIPPIANPVVMRALTQARKVVNAIIKKYGSPVSIHIELARDLSQTFDERRKTKKEQDENRKKNETAIRQLMEYGLTLNPTGHDIVKFKLWSEQNGRCAYSLQPIEIERLLEPGYVEVDHVIPYSRSLDDSYTNKVLVLTRENREKGNRIPAEYLGVGTERWQQFETFVLTNKQFSKKKRDRLLRLHYDENEETEFKNRNLNDTRYISRFFANFIREHLKFAESDDKQKVYTVNGRVTAHLRSRWEFNKNREESDLHHAVDAVIVACTTPSDIAKVTAFYQRREQNKELAKKTEPHFPQPWPHFADELRARLSKHPKESIKALNLGNYDDQKLESLQPVFVSRMPKRSVTGAAHQETLRRYVGIDERSGKIQTVVKTKLSEIKLDASGHFPMYGKESDPRTYEAIRQRLLEHNNDPKKAFQEPLYKPKKNGEPGPVIRTVKIIDTKNQVIPLNDGKTVAYNSNIVRVDVFEKDGKYYCVPVYTMDIMKGILPNKAIEPNKPYSEWKEMTEDYTFRFSLYPNDLIRIELPREKTVKTAAGEEINVKDVFVYYKTIDSANGGLELISHDHRFSLRGVGSRTLKRFEKYQVDVLGNIYKVRGEKRVGLASSAHSKPGKTIRPLQSTRD

SEQ ID NO: 62 - protein, 1228 aa, Unknown
  L. bacterium
MSKLEKFTNCYSLSKTLRFKAIPVGKTQENIDNKRLLVEDEKRAEDYKGVKKLLDRYYLSFINDVLHSIKLKNLNNYISLFRKKTRTEKENKELENLEINLRKEIAKAFKGNEGYKSLFKKDIIETILPEFLDDKDEIALVNSFNGFTTAFTGFFDNRENMFSEEAKSTSIAFRCINENLTRYISNMDIFEKVDAIFDKHEVQEIKEKILNSDYDVEDFFEGEFFNFVLTQEGIDVYNAIIGGFVTESGEKIKGLNEYINLYNQKTKQKLPKFKPLYKQVLSDRESLSFYGEGYTSDEEVLEVFRNTLNKNSEIFSSIKKLEKLFKNFDEYSSAGIFVKNGPAISTISKDIFGEWNVIRDKWNAEYDDIHLKKKAVVTEKYEDDRRKSFKKIGSFSLEQLQEYADADLSVVEKLKEIIIQKVDEIYKVYGSSEKLFDADFVLEKSLKKNDAVVAIMKDLLDSVKSFENYIKAFFGEGKETNRDESFYGDFVLAYDILLKVDHIYDAIRNYVTQKPYSKDKFKLYFQNPQFMGGWDKDKETDYRATILRYGSKYYLAIMDKKYAKCLQKIDKDDVNGNYEKINYKLLPGPNKMLPKVFFSKKWMAYYNPSEDIQKIYKNGTFKKGDMFNLNDCHKLIDFFKDSISRYPKWSNAYDFNFSETEKYKDIAGFYREVEEQGYKVSFESASKKEVDKLVEEGKLYMFQIYNKDFSDKSHGTPNLHTMYFKLLFDENNHGQIRLSGGAELFMRRASLKKEELVVHPANSPIANKNPDNPKKTTTLSYDVYKDKRFSEDQYELHIPIAINKCPKNIFKINTEVRVLLKHDDNPYVIGIDRGERNLLYIVVVDGKGNIVEQYSLNEIINNFNGIRIKTDYHSLLDKKEKERFEARQNWTSIENIKELKAGYISQVVHKICELVEKYDAVIALEDLNSGFKNSRVKVEKQVYQKFEKMLIDKLNYMVDKKSNPCATGGALKGYQITNKFESFKSMSTQNGFIFYIPAWLTSKIDPSTGFVNLLKTKYTSIADSKKFISSFDRIMYVPEEDLFEFALDYKNFSRTDADYIKKWKLYSYGNRIRIFRNPKKNNVFDWEEVCLTSAYKELFNKYGINYQQGDIRALLCEQSDKAFYSSFMALMSLMLQMRNSITGRTDVDFLISPVKNSDGIFYDSRNYEAQENAILPKNADANGAYNIARKVLWAIGQFKKAEDEKLDKVKIAISNKEWLEYAQTSVKH

SEQ ID NO: 63 - protein, 1108 aa, B. hisashii
MATRSFILKIEPNEEVKKGLWKTHEVLNHGIAYYMNILKLIRQEAIYEHHEQDPKNPKKVSKAEIQAELWDFVLKMQKCNSFTHEVDKDEVFNILRELYEELVPSSVEKKGEANQLSNKFLYPLVDPNSQSGKGTASSGRKPRWYNLKIAGDPSWEEEKKKWEEDKKKDPLAKILGKLAEYGLIPLFIPYTDSNEPIVKEIKWMEKSRNQSVRRLDKDMFIQALERFLSWESWNLKVKEEYEKVEKEYKTLEERIKEDIQALKALEQYEKERQEQLLRDTLNTNEYRLSKRGLRGWREIIQKWLKMDENEPSEKYLEVFKDYQRKHPREAGDYSVYEFLSKKENHFIWRNHPEYPYLYATFCEIDKKKKDAKQQATFTLADPINHPLWVRFEERSGSNLNKYRILTEQLHTEKLKKKLTVQLDRLIYPTESGGWEEKGKVDIVLLPSRQFYNQIFLDIEEKGKHAFTYKDESIKFPLKGTLGGARVQFDRDHLRRYPHKVESGNVGRIYFNMTVNIEPTESPVSKSLKIHRDDFPKVVNFKPKELTEWIKDSKGKKLKSGIESLEIGLRVMSIDLGQRQAAAASIFEVVDQKPDIEGKLFFPIKGTELYAVHRASFNIKLPGETLVKSREVLRKAREDNLKLMNQKLNFLRNVLHFQQFEDITEREKRVTKWISRQENSDVPLVYQDELIQIRELMYKPYKDWVAFLKQLHKRLEVEIGKEVKHWRKSLSDGRKGLYGISLKNIDEIDRTRKFLLRWSLRPTEPGEVRRLEPGQRFAIDQLNHLNALKEDRLKKMANTIIMHALGYCYDVRKKKWQAKNPACQIILFEDLSNYNPYEERSRFENSKLMKWSRREIPRQVALQGEIYGLQVGEVGAQFSSRFHAKTGSPGIRCSVVTKEKLQDNRFFKNLQREGRLTLDKIAVLKEGDLYPDKGGEKFISLSKDRKCVTTHADINAAQNLQKRFWTRTHGFYKVYCKAYQVDGQTVYIPESKDQKQKIIEEFGEGYFILKDGVYEWVNAGKLKIKKGSSKQSSSELVDSDILKDSFDLASELKGEKLMLYRDPSGNVFPSDKWMAAGVFFGKLERILISKLTNQYSISTIEDDSSKQSM

SEQ ID NO: 64 - protein, 1307 aa, Unknown
  Acidaminococcus sp.
MTQFEGFTNLYQVSKTLRFELIPQGKTLKHIQEQGFIEEDKARNDHYKELKPIIDRIYKTYADQCLQLVQLDWENLSAAIDSYRKEKTEETRNALIEEQATYRNAIHDYFIGRTDNLTDAINKRHAEIYKGLFKAELFNGKVLKQLGTVTTTEHENALLRSFDKFTTYFSGFYENRKNVFSAEDISTAIPHRIVQDNFPKFKENCHIFTRLITAVPSLREHFENVKKAIGIFVSTSIEEVFSFPFYNQLLTQTQIDLYNQLLGGISREAGTEKIKGLNEVLNLAIQKNDETAHIIASLPHRFIPLFKQILSDRNTLSFILEEFKSDEEVIQSFCKYKTLLRNENVLETAEALFNELNSIDLTHIFISHKKLETISSALCDHWDTLRNALYERRISELTGKITKSAKEKVQRSLKHEDINLQEIISAAGKELSEAFKQKTSEILSHAHAALDQPLPTTLKKQEEKEILKSQLDSLLGLYHLLDWFAVDESNEVDPEFSARLTGIKLEMEPSLSFYNKARNYATKKPYSVEKFKLNFQMPTLASGWDVNKEKNNGAILFVKNGLYYLGIMPKQKGRYKALSFEPTEKTSEGFDKMYYDYFPDAAKMIPKCSTQLKAVTAHFQTHTTPILLSNNFIEPLEITKEIYDLNNPEKEPKKFQTAYAKKTGDQKGYREALCKWIDFTRDFLSKYTKTTSIDLSSLRPSSQYKDLGEYYAELNPLLYHISFQRIAEKEIMDAVETGKLYLFQIYNKDFAKGHHGKPNLHTLYWTGLFSPENLAKTSIKLNGQAELFYRPKSRMKRMAHRLGEKMLNKKLKDQKTPIPDTLYQELYDYVNHRLSHDLSDEARALLPNVITKEVSHEIIKDRRFTSDKFFFHVPITLNYQAANSPSKFNQRVNAYLKEHPETPIIGIDRGERNLIYITVIDSTGKILEQRSLNTIQQFDYQKKLDNREKERVAARQAWSVVGTIKDLKQGYLSQVIHEIVDLMIHYQAVVVLENLNFGFKSKRTGIAEKAVYQQFEKMLIDKLNCLVLKDYPAEKVGGVLNPYQLTDQFTSFAKMGTQSGFLFYVPAPYTSKIDPLTGFVDPFVWKTIKNHESRKHFLEGFDFLHYDVKTGDFILHFKMNRNLSFQRGLPGFMPAWDIVFEKNETQFDAKGTPFIAGKRIVPVIENHRFTGRYRDLYPANELIALLEEKGIVFRDGSNILPKLLENDDSHAIDTMVALIRSVLQMRNSNAATGEDYINSPVRDLNGVCFDSRFQNPEWPMDADANGAYHIALKGQLLLNHLKESKDLKLQNGISNQDWLAYIQELRN

SEQ ID NO: 65 - protein, 1307 aa, Unknown
  AsCas12a nickase (e.g., R1226A)
MTQFEGFTNLYQVSKTLRFELIPQGKTLKHIQEQGFIEEDKARNDHYKELKPIIDRIYKTYADQCLQLVQLDWENLSAAIDSYRKEKTEETRNALIEEQATYRNAIHDYFIGRTDNLTDAINKRHAEIYKGLFKAELFNGKVLKQLGTVTTTEHENALLRSFDKFTTYFSGFYENRKNVFSAEDISTAIPHRIVQDNFPKFKENCHIFTRLITAVPSLREHFENVKKAIGIFVSTSIEEVFSFPFYNQLLTQTQIDLYNQLLGGISREAGTEKIKGLNEVLNLAIQKNDETAHIIASLPHRFIPLFKQILSDRNTLSFILEEFKSDEEVIQSFCKYKTLLRNENVLETAEALFNELNSIDLTHIFISHKKLETISSALCDHWDTLRNALYERRISELTGKITKSAKEKVQRSLKHEDINLQEIISAAGKELSEAFKQKTSEILSHAHAALDQPLPTTLKKQEEKEILKSQLDSLLGLYHLLDWFAVDESNEVDPEFSARLTGIKLEMEPSLSFYNKARNYATKKPYSVEKFKLNFQMPTLASGWDVNKEKNNGAILFVKNGLYYLGIMPKQKGRYKALSFEPTEKTSEGFDKMYYDYFPDAAKMIPKCSTQLKAVTAHFQTHTTPILLSNNFIEPLEITKEIYDLNNPEKEPKKFQTAYAKKTGDQKGYREALCKWIDFTRDFLSKYTKTTSIDLSSLRPSSQYKDLGEYYAELNPLLYHISFQRIAEKEIMDAVETGKLYLFQIYNKDFAKGHHGKPNLHTLYWTGLFSPENLAKTSIKLNGQAELFYRPKSRMKRMAHRLGEKMLNKKLKDQKTPIPDTLYQELYDYVNHRLSHDLSDEARALLPNVITKEVSHEIIKDRRFTSDKFFFHVPITLNYQAANSPSKFNQRVNAYLKEHPETPIIGIDRGERNLIYITVIDSTGKILEQRSLNTIQQFDYQKKLDNREKERVAARQAWSVVGTIKDLKQGYLSQVIHEIVDLMIHYQAVVVLENLNFGFKSKRTGIAEKAVYQQFEKMLIDKLNCLVLKDYPAEKVGGVLNPYQLTDQFTSFAKMGTQSGFLFYVPAPYTSKIDPLTGFVDPFVWKTIKNHESRKHFLEGFDFLHYDVKTGDFILHFKMNRNLSFQRGLPGFMPAWDIVFEKNETQFDAKGTPFIAGKRIVPVIENHRFTGRYRDLYPANELIALLEEKGIVFRDGSNILPKLLENDDSHAIDTMVALIRSVLQMANSNAATGEDYINSPVRDLNGVCFDSRFQNPEWPMDADANGAYHIALKGQLLLNHLKESKDLKLQNGISNQDWLAYIQELRN

SEQ ID NO: 66 - protein, 1259 aa, Unknown
  Lachnospiraceae bacterium GAM79
MNYKTGLEDFIGKESLSKTLRNALIPTESTKIHMEEMGVIRDDELRAEKQQELKEIMDDYYRTFIEEKLGQIQGIQWNSLFQKMEETMEDISVRKDLDKIQNEKRKEICCYFTSDKRFKDLFNAKLITDILPNFIKDNKEYTEEEKAEKEQTRVLFQRFATAFTNYFNQRRNNFSEDNISTAISFRIVNENSEIHLQNMRAFQRIEQQYPEEVCGMEEEYKDMLQEWQMKHIYSVDFYDRELTQPGIEYYNGICGKINEHMNQFCQKNRINKNDFRMKKLHKQILCKKSSYYEIPFRFESDQEVYDALNEFIKTMKKKEIIRRCVHLGQECDDYDLGKIYISSNKYEQISNALYGSWDTIRKCIKEEYMDALPGKGEKKEEKAEAAAKKEEYRSIADIDKIISLYGSEMDRTISAKKCITEICDMAGQISIDPLVCNSDIKLLQNKEKTTEIKTILDSFLHVYQWGQTFIVSDIIEKDSYFYSELEDVLEDFEGITTLYNHVRSYVTQKPYSTVKFKLHFGSPTLANGWSQSKEYDNNAILLMRDQKFYLGIFNVRNKPDKQIIKGHEKEEKGDYKKMIYNLLPGPSKMLPKVFITSRSGQETYKPSKHILDGYNEKRHIKSSPKFDLGYCWDLIDYYKECIHKHPDWKNYDFHFSDTKDYEDISGFYREVEMQGYQIKWTYISADEIQKLDEKGQIFLFQIYNKDFSVHSTGKDNLHTMYLKNLFSEENLKDIVLKLNGEAELFFRKASIKTPIVHKKGSVLVNRSYTQTVGNKEIRVSIPEEYYTEIYNYLNHIGKGKLSSEAQRYLDEGKIKSFTATKDIVKNYRYCCDHYFLHLPITINFKAKSDVAVNERTLAYIAKKEDIHIIGIDRGERNLLYISVVDVHGNIREQRSFNIVNGYDYQQKLKDREKSRDAARKNWEEIEKIKELKEGYLSMVIHYIAQLVVKYNAVVAMEDLNYGFKTGRFKVERQVYQKFETMLIEKLHYLVFKDREVCEEGGVLRGYQLTYIPESLKKVGKQCGFIFYVPAGYTSKIDPTTGFVNLFSFKNLTNRESRQDFVGKFDEIRYDRDKKMFEFSFDYNNYIKKGTILASTKWKVYTNGTRLKRIVVNGKYTSQSMEVELTDAMEKMLQRAGIEYHDGKDLKGQIVEKGIEAEIIDIFRLTVQMRNSRSESEDREYDRLISPVLNDKGEFFDTATADKTLPQDADANGAYCIALKGLYEVKQIKENWKENEQFPRNKLVQDNKTWFDFMQKKRYL

SEQ ID NO: 67 - protein, 1306 aa, Prevotella copri
MAKNFEDFKRLYSLSKTLRFEAKPIGATLDNIVKSGLLDEDEHRAASYVKVKKLIDEYHKVFIDRVLDDGCLPLENKGNNNSLAEYYESYVSRAQDEDAKKKFKEIQQNLRSVIAKKLTEDKAYANLFGNKLIESYKDKEDKKKIIDSDLIQFINTAESTQLDSMSQDEAKELVKEFWGFVTYFYGFFDNRKNMYTAEEKSTGIAYRLVNENLPKFIDNIEAFNRAITRPEIQENMGVLYSDFSEYLNVESIQEMFQLDYYNMLLTQKQIDVYNAIIGGKTDDEHDVKIKGINEYINLYNQQHKDDKLPKLKALFKQILSDRNAISWLPEEFNSDQEVLNAIKDCYERLAENVLGDKVLKSLLGSLADYSLDGIFIRNDLQLTDISQKMFGNWGVIQNAIMQNIKRVAPARKHKESEEDYEKRIAGIFKKADSFSISYINDCLNEADPNNAYFVENYFATFGAVNTPTMQRENLFALVQNAYTEVAALLHSDYPTVKHLAQDKANVSKIKALLDAIKSLQHFVKPLLGKGDESDKDERFYGELASLWAELDTVTPLYNMIRNYMTRKPYSQKKIKLNFENPQLLGGWDANKEKDYATIILRRNGLYYLAIMDKDSRKLLGKAMPSDGECYEKMVYKFFKDVTTMIPKCSTQLKDVQAYFKVNTDDYVLNSKAFNKPLTITKEVFDLNNVLYGKYKKFQKGYLTATGDNVGYTHAVNVWIKFCMDFLNSYDSTCIYDFSSLKPESYLSLDAFYQDANLLLYKLSFARASVSYINQLVEEGKMYLFQIYNKDFSEYSKGTPNMHTLYWKALFDERNLADVVYKLNGQAEMFYRKKSIENTHPTHPANHPILNKNKDNKKKESLFDYDLIKDRRYTVDKFMFHVPITMNFKSVGSENINQDVKAYLRHADDMHIIGIDRGERHLLYLVVIDLQGNIKEQYSLNEIVNEYNGNTYHTNYHDLLDVREEERLKARQSWQTIENIKELKEGYLSQVIHKITQLMVRYHAIVVLEDLSKGFMRSRQKVEKQVYQKFEKMLIDKLNYLVDKKTDVSTPGGLLNAYQLTCKSDSSQKLGKQSGFLFYIPAWNTSKIDPVTGFVNLLDTHSLNSKEKIKAFFSKFDAIRYNKDKKWFEFNLDYDKFGKKAEDTRTKWTLCTRGMRIDTFRNKEKNSQWDNQEVDLTTEMKSLLEHYYIDIHGNLKDAISAQTDKAFFTGLLHILKLTLQMRNSITGTETDYLVSPVADENGIFYDSRSCGNQLPENADANGAYNIARKGLMLIEQIKNAEDLNNVKFDISNKAWLNFAQQKPYKNG

SEQ ID NO: 68 - protein, 1142 aa, Eubacterium rectale
MFSAKLISDILPEFVIHNNNYSASEKEEKTQVIKLFSRFATSFKDYFKNRANCFSANDISSSSCHRIVNDNAEIFFSNALVYRRIVKNLSNDDINKISGDMKDSLKEMSLEEIYSYEKYGEFITQEGISFYNDICGKVNLFMNLYCQKNKENKNLYKLRKLHKQILCIADTSYEVPYKFESDEEVYQSVNGFLDNISSKHIVERLRKIGENYNGYNLDKIYIVSKFYESVSQKTYRDWETINTALEIHYNNILPGNGKSKADKVKKAVKNDLQKSITEINELVSNYKLCPDDNIKAETYIHEISHILNNFEAQELKYNPEIHLVESELKASELKNVLDVIMNAFHWCSVFMTEELVDKDNNFYAELEEIYDEIYPVISLYNLVRNYVTQKPYSTKKIKLNFGIPTLADGWSKSKEYSNNAIILMRDNLYYLGIFNAKNKPDKKIIEGNTSENKGDYKKMIYNLLPGPNKMIPKVFLSSKTGVETYKPSAYILEGYKQNKHLKSSKDFDITFCHDLIDYFKNCIAIHPEWKNFGFDFSDTSTYEDISGFYREVELQGYKIDWTYISEKDIDLLQEKGQLYLFQIYNKDFSKKSSGNDNLHTMYLKNLFSEENLKDIVLKLNGEAEIFFRKSSIKNPIIHKKGSILVNRTYEAEEKDQFGNIQIVRKTIPENIYQELYKYFNDKSDKELSDEAAKLKNVVGHHEAATNIVKDYRYTYDKYFLHMPITINFKANKTSFINDRILQYIAKEKDLHVIGIDRGERNLIYVSVIDTCGNIVEQKSFNIVNGYDYQIKLKQQEGARQIARKEWKEIGKIKEIKEGYLSLVIHEISKMVIKYNAIIAMEDLSYGFKKGRFKVERQVYQKFETMLINKLNYLVFKDISITENGGLLKGYQLTYIPDKLKNVGHQCGCIFYVPAAYTSKIDPTTGFVNIFKFKDLTVDAKREFIKKFDSIRYDSDKNLFCFTFDYNNFITQNTVMSKSSWSVYTYGVRIKRRFVNGRFSNESDTIDITKDMEKTLEMTDINWRDGHDLRQDIIDYEIVQHIFEIFKLTVQMRNSLSELEDRDYDRLISPVLNENNIFYDSAKAGDALPKDADANGAYCIALKGLYEIKQITENWKEDGKFSRDKLKISNKDWFDFIQNKRYL

SEQ ID NO: 69 - protein, 1259 aa, Unknown
  Acidaminococcus sp.
MNYKTGLEDFIGKESLSKTLRNALIPTESTKIHMEEMGVIRDDELRAEKQQELKEIMDDYYRAFIEEKLGQIQGIQWNSLFQKMEETMEDISVRKDLDKIQNEKRKEICCYFTSDKRFKDLFNAKLITDILPNFIKDNKEYTEEEKAEKEQTRVLFQRFATAFTNYFNQRRNNFSEDNISTAISFRIVNENSEIHLQNMRAFQRIEQQYPEEVCGMEEEYKDMLQEWQMKHIYLVDFYDRVLTQPGIEYYNGICGKINEHMNQFCQKNRINKNDFRMKKLHKQILCKKSSYYEIPFRFESDQEVYDALNEFIKTMKEKEIICRCVHLGQKCDDYDLGKIYISSNKYEQISNALYGSWDTIRKCIKEEYMDALPGKGEKKEEKAEAAAKKEEYRSIADIDKIISLYGSEMDRTISAKKCITEICDMAGQISTDPLVCNSDIKLLQNKEKTTEIKTILDSFLHVYQWGQTFIVSDIIEKDSYFYSELEDVLEDFEGITTLYNHVRSYVTQKPYSTVKFKLHFGSPTLANGWSQSKEYDNNAILLMRDQKFYLGIFNVRNKPDKQIIKGHEKEEKGDYKKMIYNLLPGPSKMLPKVFITSRSGQETYKPSKHILDGYNEKRHIKSSPKFDLGYCWDLIDYYKECIHKHPDWKNYDFHFSDTKDYEDISGFYREVEMQGYQIKWTYISADEIQKLDEKGQIFLFQIYNKDFSVHSTGKDNLHTMYLKNLFSEENLKDIVLKLNGEAELFFRKASIKTPVVHKKGSVLVNRSYTQTVGDKEIRVSIPEEYYTEIYNYLNHIGRGKLSTEAQRYLEERKIKSFTATKDIVKNYRYCCDHYFLHLPITINFKAKSDIAVNERTLAYIAKKEDIHIIGIDRGERNLLYISVVDVHGNIREQRSFNIVNGYDYQQKLKDREKSRDAARKNWEEIEKIKELKEGYLSMVIHYIAQLVVKYNAVVAMEDLNYGFKTGRFKVERQVYQKFETMLIEKLHYLVFKDREVCEEGGVLRGYQLTYIPESLKKVGKQCGFIFYVPAGYTSKIDPTTGFVNLFSFKNLTNRESRQDFVGKFDEIRYDRDKKMFEFSFDYNNYIKKGTMLASTKWKVYTNGTRLKRIVVNGKYTSQSMEVELTDAMEKMLQRAGIEYHDGKDLKGQIVEKGIEAEIIDIFRLTVQMRNSRSESEDREYDRLISPVLNDKGEFFDTATADKTLPQDADANGAYCIALKGLYEVKQIKENWKENEQFPRNKLVQDNKTWFDFMQKKRYL

SEQ ID NO: 70 - protein, 1108 aa, Bacillus hisashii; identical to SEQ ID NO: 63

SEQ ID NO: 71 - protein, 1465 aa, Thermomonas hydrothermalis
MSEKTTQRAYTLRLNRASGECAVCQNNSCDCWHDALWATHKAVNRGAKAFGDWLLTLRGGLCHTLVEMEVPAKGNNPPQRPTDQERRDRRVLLALSWLSVEDEHGAPKEFIVATGRDSADDRAKKVEEKLREILEKRDFQEHEIDAWLQDCGPSLKAHIREDAVWVNRRALFDAAVERIKTLTWEEAWDFLEPFFGTQYFAGIGDGKDKDDAEGPARQGEKAKDLVQKAGQWLSARFGIGTGADFMSMAEAYEKIAKWASQAQNGDNGKATIEKLACALRPSEPPTLDTVLKCISGPGHKSATREYLKTLDKKSTVTQEDLNQLRKLADEDARNCRKKVGKKGKKPWADEVLKDVENSCELTYLQDNSPARHREFSVMLDHAARRVSMAHSWIKKAEQRRRQFESDAQKLKNLQERAPSAVEWLDRFCESRSMTTGANTGSGYRIRKRAIEGWSYVVQAWAEASCDTEDKRIAAARKVQADPEIEKFGDIQLFEALAADEAICVWRDQEGTQNPSILIDYVTGKTAEHNQKRFKVPAYRHPDELRHPVFCDFGNSRWSIQFAIHKEIRDRDKGAKQDTRQLQNRHGLKMRLWNGRSMTDVNLHWSSKRLTADLALDQNPNPNPTEVTRADRLGRAASSAFDHVKIKNVFNEKEWNGRLQAPRAELDRIAKLEEQGKTEQAEKLRKRLRWYVSFSPCLSPSGPFIVYAGQHNIQPKRSGQYAPHAQANKGRARLAQLILSRLPDLRILSVDLGHRFAAACAVWETLSSDAFRREIQGLNVLAGGSGEGDLFLHVEMTGDDGKRRTVVYRRIGPDQLLDNTPHPAPWARLDRQFLIKLQGEDEGVREASNEELWTVHKLEVEVGRTVPLIDRMVRSGFGKTEKQKERLKKLRELGWISAMPNEPSAETDEKEGEIRSISRSVDELMSSALGTLRLALKRHGNRARIAFAMTADYKPMPGGQKYYFHEAKEASKNDDETKRRDNQIEFLQDALSLWHDLFSSPDWEDNEAKKLWQNHIATLPNYQTPEEISAELKRVERNKKRKENRDKLRTAAKALAENDQLRQHLHDTWKERWESDDQQWKERLRSLKDWIFPRGKAEDNPSIRHVGGLSITRINTISGLYQILKAFKMRPEPDDLRKNIPQKGDDELENFNRRLLEARDRLREQRVKQLASRIIEAALGVGRIKIPKNGKLPKRPRTTVDTPCHAVVIESLKTYRPDDLRTRRENRQLMQWSSAKVRKYLKEGCELYGLHFLEVPANYTSRQCSRTGLPGIRCDDVPTGDFLKAPWWRRAINTAREKNGGDAKDRFLVDLYDHLNNLQSKGEALPATVRVPRQGGNLFIAGAQLDDTNKERRAIQADLNAAANIGLRALLDPDWRGRWWYVPCKDGTSEPALDRIEGSTAFNDVRSLPTGDNSSRRAPREIENLWRDPSGDSLESGTWSPTRAYWDTVQSRVIELLRRHAGLPTS

SEQ ID NO: 72 - protein, 1090 aa, Laceyella sacchari
MSIRSFKLKLKTKSGVNAEQLRRGLWRTHQLINDGIAYYMNWLVLLRQEDLFIRNKETNEIEKRSKEEIQAVLLERVHKQQQRNQWSGEVDEQTLLQALRQLYEEIVPSVIGKSGNASLKARFFLGPLVDPNNKTTKDVSKSGPTPKWKKMKDAGDPNWVQEYEKYMAERQTLVRLEEMGLIPLFPMYTDEVGDIHWLPQASGYTRTWDRDMFQQAIERLLSWESWNRRVRERRAQFEKKTHDFASRFSESDVQWMNKLREYEAQQEKSLEENAFAPNEPYALTKKALRGWERVYHSWMRLDSAASEEAYWQEVATCQTAMRGEFGDPAIYQFLAQKENHDIWRGYPERVIDFAELNHLQRELRRAKEDATFTLPDSVDHPLWVRYEAPGGTNIHGYDLVQDTKRNLTLILDKFILPDENGSWHEVKKVPFSLAKSKQFHRQVWLQEEQKQKKREVVFYDYSTNLPHLGTLAGAKLQWDRNFLNKRTQQQIEETGEIGKVFFNISVDVRPAVEVKNGRLQNGLGKALTVLTHPDGTKIVTGWKAEQLEKWVGESGRVSSLGLDSLSEGLRVMSIDLGQRTSATVSVFEITKEAPDNPYKFFYQLEGTEMFAVHQRSFLLALPGENPPQKIKQMREIRWKERNRIKQQVDQLSAILRLHKKVNEDERIQAIDKLLQKVASWQLNEEIATAWNQALSQLYSKAKENDLQWNQAIKNAHHQLEPVVGKQISLWRKDLSTGRQGIAGLSLWSIEELEATKKLLTRWSKRSREPGVVKRIERFETFAKQIQHHINQVKENRLKQLANLIVMTALGYKYDQEQKKWIEVYPACQVVLFENLRSYRFSFERSRRENKKLMEWSHRSIPKLVQMQGELFGLQVADVYAAYSSRYHGRTGAPGIRCHALTEADLRNETNIIHELIEAGFIKEEHRPYLQQGDLVPWSGGELFATLQKPYDNPRILTLHADINAAQNIQKRFWHPSMWFRVNCESVMEGEIVTYVPKNKTVHKKQGKTFRFVKVEGSDVYEWAKWSKNRNKNTFSSITERKPPSSMILFRDPSGTFFKEQEWVEQKTFWGKVQSMIQAYMKKTIVQRMEE

SEQ ID NO: 73 - protein, 1194 aa, Dsulfonatronum thiodismutans
MVLGRKDDTAELRRALWTTHEHVNLAVAEVERVLLRCRGRSYWTLDRRGDPVHVPESQVAEDALAMAREAQRRNGWPVVGEDEEILLALRYLYEQIVPSCLLDDLGKPLKGDAQKIGTNYAGPLFDSDTCRRDEGKDVACCGPFHEVAGKYLGALPEWATPISKQEFDGKDASHLRFKATGGDDAFFRVSIEKANAWYEDPANQDALKNKAYNKDDWKKEKDKGISSWAVKYIQKQLQLGQDPRTEVRRKLWLELGLLPLFIPVFDKTMVGNLWNRLAVRLALAHLLSWESWNHRAVQDQALARAKRDELAALFLGMEDGFAGLREYELRRNESIKQHAFEPVDRPYVVSGRALRSWTRVREEWLRHGDTQESRKNICNRLQDRLRGKFGDPDVFHWLAEDGQEALWKERDCVTSFSLLNDADGLLEKRKGYALMTFADARLHPRWAMYEAPGGSNLRTYQIRKTENGLWADVVLLSPRNESAAVEEKTFNVRLAPSGQLSNVSFDQIQKGSKMVGRCRYQSANQQFEGLLGGAEILFDRKRIANEQHGATDLASKPGHVWFKLTLDVRPQAPQGWLDGKGRPALPPEAKHFKTALSNKSKFADQVRPGLRVLSVDLGVRSFAACSVFELVRGGPDQGTYFPAADGRTVDDPEKLWAKHERSFKITLPGENPSRKEEIARRAAMEELRSLNGDIRRLKAILRLSVLQEDDPRTEHLRLFMEAIVDDPAKSALNAELFKGFGDDRFRSTPDLWKQHCHFFHDKAEKVVAERFSRWRTETRPKSSSWQDWRERRGYAGGKSYWAVTYLEAVRGLILRWNMRGRTYGEVNRQDKKQFGTVASALLHHINQLKEDRIKTGADMIIQAARGFVPRKNGAGWVQVHEPCRLILFEDLARYRFRTDRSRRENSRLMRWSHREIVNEVGMQGELYGLHVDTTEAGFSSRYLASSGAPGVRCRHLVEEDFHDGLPGMHLVGELDWLLPKDKDRTANEARRLLGGMVRPGMLVPWDGGELFATLNAASQLHVIHADINAAQNLQRRFWGRCGEAIRIVCNQLSVDGSTRYEMAKAPKARLLGALQQLKNGDAPFHLTSIPNSQKPENSYVMTPTNAGKKYRAGPGEKSSGEEDELALDIVEQAEELAQGRKTFFRDPSGVFFAPDRWLPSEIYWSRIRRRIWQVTLERNSSGRQERAEMDEMPY

SEQ ID NO: 74 - protein, 1300 aa, Francisella novicida
MSIYQEFVNKYSLSKTLRFELIPQGKTLENIKARGLILDDEKRAKDYKKAKQIIDKYHQFFIEEILSSVCISEDLLQNYSDVYFKLKKSDDDNLQKDFKSAKDTIKKQISEYIKDSEKFKNLFNQNLIDAKKGQESDLILWLKQSKDNGIELFKANSDITDIDEALEIIKSFKGWTTYFKGFHENRKNVYSSNDIPTSIIYRIVDDNLPKFLENKAKYESLKDKAPEAINYEQIKKDLAEELTFDIDYKTSEVNQRVFSLDEVFEIANFNNYLNQSGITKFNTIIGGKFVNGENTKRKGINEYINLYSQQINDKTLKKYKMSVLFKQILSDTESKSFVIDKLEDDSDVVTTMQSFYEQIAAFKTVEEKSIKETLSLLFDDLKAQKLDLSKIYFKNDKSLTDLSQQVFDDYSVIGTAVLEYITQQIAPKNLDNPSKKEQELIAKKTEKAKYLSLETIKLALEEFNKHRDIDKQCRFEEILANFAAIPMIFDEIAQNKDNLAQISIKYQNQGKKDLLQASAEDDVKAIKDLLDQTNNLLHKLKIFHISQSEDKANILDKDEHFYLVFEECYFELANIVPLYNKIRNYITQKPYSDEKFKLNFENSTLANGWDKNKEPDNTAILFIKDDKYYLGVMNKKNNKIFDDKAIKENKGEGYKKIVYKLLPGANKMLPKVFFSAKSIKFYNPSEDILRIRNHSTHTKNGSPQKGYEKFEFNIEDCRKFIDFYKQSISKHPEWKDFGFRFSDTQRYNSIDEFYREVENQGYKLTFENISESYIDSVVNQGKLYLFQIYNKDFSAYSKGRPNLHTLYWKALFDERNLQDVVYKLNGEAELFYRKQSIPKKITHPAKEAIANKNKDNPKKESVFEYDLIKDKRFTEDKFFFHCPITINFKSSGANKFNDEINLLLKEKANDVHILSIDRGERHLAYYTLVDGKGNIIKQDTFNIIGNDRMKTNYHDKLAAIEKDRDSARKDWKKINNIKEMKEGYLSQVVHEIAKLVIEYNAIVVFEDLNFGFKRGRFKVEKQVYQKLEKMLIEKLNYLVFKDNEFDKTGGVLRAYQLTAPFETFKKMGKQTGIIYYVPAGFTSKICPVTGFVNQLYPKYESVSKSQEFFSKFDKICYNLDKGYFEFSFDYKNFGDKAAKGKWTIASFGSRLINFRNSDKNHNWDTREVYPTKELEKLLKDYSIEYGHGECIKAAICGESDKKFFAKLTSVLNTILQMRNSKTGTELDYLISPVADVNGNFFDSRQAPKNMPQDADANGAYHIGLKGLMLLGRIKNNQEGKKLNLVIKNEEYFEFVQNRNN

SEQ ID NO: 75 - protein, 1082 aa, Geobacillus thermodenitrificans; identical to SEQ ID NO: 38

SEQ ID NO: 76 - protein, 887 aa, Natronobacterium gregoryi
MTVIDLDSTTTADELTSGHTYDISVTLTGVYDNTDEQHPRMSLAFEQDNGERRYITLWKNTTPKDVFTYDYATGSTYIFTNIDYEVKDGYENLTATYQTTVENATAQEVGTTDEDETFAGGEPLDHHLDDALNETPDDAETESDSGHVMTSFASRDQLPEWTLHTYTLTATDGAKTDTEYARRTLAYTVRQELYTDHDAAPVATDGLMLLTPEPLGETPLDLDCGVRVEADETRTLDYTTAKDRLLARELVEEGLKRSLWDDYLVRGIDEVLSKEPVLTCDEFDLHERYDLSVEVGHSGRAYLHINFRHRFVPKLTLADIDDDNIYPGLRVKTTYRPRRGHIVWGLRDECATDSLNTLGNQSVVAYHRNNQTPINTDLLDAIEAADRRVVETRRQGHGDDAVSFPQELLAVEPNTHQIKQFASDGFHQQARSKTRLSASRCSEKAQAFAERLDPVRLNGSTVEFSSEFFTGNNEQQLRLLYENGESVLTFRDGARGAHPDETFSKGIVNPPESFEVAVVLPEQQADTCKAQWDTMADLLNQAGAPPTRSETVQYDAFSSPESISLNVAGAIDPSEVDAAFVVLPPDQEGFADLASPTETYDELKKALANMGIYSQMAYFDRFRDAKIFYTRNVALGLLAAAGGVAFTTEHAMPGDADMFIGIDVSRSYPEDGASGQINIAATATAVYKDGTILGHSSTRPQLGEKLQSTDVRDIMKNAILGYQQVTGESPTHIVIHRDGFMNEDLDPATEFLNEQGVEYDIVEIRKQPQTRLLAVSDVQYDTPVKSIAAINQNEPRATVATFGAPEYLATRDGGGLPRPIQIERVAGETDIETLTRQVYLLSQSHIQVHNSTARLPITTAYADQASTHATKGYLVQTGAFESNVGFL

SEQ ID NO: 77 - protein, 1387 aa, Artificial Sequence
  Synthetic
DYKVYDVRKMIAKSEQEIGKATAKYFFYSNIMNFFKTEITLANGEIRKRPLIETNGETGEIVWDKGRDFATVRKVLSMPQVNIVKKTEVQTGGFSKESILPKRNSDKLIARKKDWDPKKYGGFDSPTVAYSVLVVAKVEKGKSKKLKSVKELLGITIMERSSFEKNPIDFLEAKGYKEVKKDLIIKLPKYSLFELENGRKRMLASAGELQKGNELALPSKYVNFLYLASHYEKLKGSPEDNEQKQLFVEQHKHYLDEIIEQISEFSKRVILADANLDKVLSAYNKHRDKPIREQAENIIHLFTLTNLGAPAAFKYFDTTIDRKRYTSTKEVLDATLIHQSITGLYETRIDLSQLGGDGGSGGSGGSGGSGGSGGSGGDKKYSIGLAIGTNSVGWAVITDEYKVPSKKFKVLGNTDRHSIKKNLIGALLFDSGETAEATRLKRTARRRYTRRKNRICYLQEIFSNEMAKVDDSFFHRLEESFLVEEDKKHERHPIFGNIVDEVAYHEKYPTIYHLRKKLVDSTDKADLRLIYLALAHMIKFRGHFLIEGDLNPDNSDVDKLFIQLVQTYNQLFEENPINASGVDAKAILSARLSKSRRLENLIAQLPGEKKNGLFGNLIALSLGLTPNFKSNFDLAEDAKLQLSKDTYDDDLDNLLAQIGDQYADLFLAAKNLSDAILLSDILRVNTEITKAPLSASMIKRYDEHHQDLTLLKALVRQQLPEKYKEIFFDQSKNGYAGYIDGGASQEEFYKFIKPILEKMDGTEELLVKLNREDLLRKQRTFDNGSIPHQIHLGELHAILRRQEDFYPFLKDNREKIEKILTFRIPYYVGPLARGNSRFAWMTRKSEETITPWNFEEVVDKGASAQSFIERMTNFDKNLPNEKVLPKHSLLYEYFTVYNELTKVKYVTEGMRKPAFLSGEQKKAIVDLLFKTNRKVTVKQLKEDYFKKIECFDSVEISGVEDRFNASLGTYHDLLKIIKDKDFLDNEENEDILEDIVLTLTLFEDREMIEERLKTYAHLFDDKVMKQLKRRRYTGWGRLSRKLINGIRDKQSGKTILDFLKSDGFANRNFMQLIHDDSLTFKEDIQKAQVSGQGDSLHEHIANLAGSPAIKKGILQTVKVVDELVKVMGRHKPENIVIEMARENQTTQKGQKNSRERMKRIEEGIKELGSQILKEHPVENTQLQNEKLYLYYLQNGRDMYVDQELDINRLSDYDVDHIVPQSFLKDDSIDNKVLTRSDKNRGKSDNVPSEEVVKKMKNYWRQLLNAKLITQRKFDNLTKAERGGLSELDKAGFIKRQLVETRQITKHVAQILDSRMNTKYDENDKLIREVKVITLKSKLVSDFRKDFQFYKVREINNYHHAHDAYLNAVVGTALIKKYPKLESEFVYG

SEQ ID NO: 78 - protein, 1388 aa, Artificial Sequence
  Synthetic
EIGKATAKYFFYSNIMNFFKTEITLANGEIRKRPLIETNGETGEIVWDKGRDFATVRKVLSMPQVNIVKKTEVQTGGFSKESILPKRNSDKLIARKKDWDPKKYGGFDSPTVAYSVLVVAKVEKGKSKKLKSVKELLGITIMERSSFEKNPIDFLEAKGYKEVKKDLIIKLPKYSLFELENGRKRMLASAGELQKGNELALPSKYVNFLYLASHYEKLKGSPEDNEQKQLFVEQHKHYLDEIIEQISEFSKRVILADANLDKVLSAYNKHRDKPIREQAENIIHLFTLTNLGAPAAFKYFDTTIDRKRYTSTKEVLDATLIHQSITGLYETRIDLSQLGGDGGSGGSGGSGGSGGSGGSGGMDKKYSIGLAIGTNSVGWAVITDEYKVPSKKFKVLGNTDRHSIKKNLIGALLFDSGETAEATRLKRTARRRYTRRKNRICYLQEIFSNEMAKVDDSFFHRLEESFLVEEDKKHERHPIFGNIVDEVAYHEKYPTIYHLRKKLVDSTDKADLRLIYLALAHMIKFRGHFLIEGDLNPDNSDVDKLFIQLVQTYNQLFEENPINASGVDAKAILSARLSKSRRLENLIAQLPGEKKNGLFGNLIALSLGLTPNFKSNFDLAEDAKLQLSKDTYDDDLDNLLAQIGDQYADLFLAAKNLSDAILLSDILRVNTEITKAPLSASMIKRYDEHHQDLTLLKALVRQQLPEKYKEIFFDQSKNGYAGYIDGGASQEEFYKFIKPILEKMDGTEELLVKLNREDLLRKQRTFDNGSIPHQIHLGELHAILRRQEDFYPFLKDNREKIEKILTFRIPYYVGPLARGNSRFAWMTRKSEETITPWNFEEVVDKGASAQSFIERMTNFDKNLPNEKVLPKHSLLYEYFTVYNELTKVKYVTEGMRKPAFLSGEQKKAIVDLLFKTNRKVTVKQLKEDYFKKIECFDSVEISGVEDRFNASLGTYHDLLKIIKDKDFLDNEENEDILEDIVLTLTLFEDREMIEERLKTYAHLFDDKVMKQLKRRRYTGWGRLSRKLINGIRDKQSGKTILDFLKSDGFANRNFMQLIHDDSLTFKEDIQKAQVSGQGDSLHEHIANLAGSPAIKKGILQTVKVVDELVKVMGRHKPENIVIEMARENQTTQKGQKNSRERMKRIEEGIKELGSQILKEHPVENTQLQNEKLYLYYLQNGRDMYVDQELDINRLSDYDVDHIVPQSFLKDDSIDNKVLTRSDKNRGKSDNVPSEEVVKKMKNYWRQLLNAKLITQRKFDNLTKAERGGLSELDKAGFIKRQLVETRQITKHVAQILDSRMNTKYDENDKLIREVKVITLKSKLVSDFRKDFQFYKVREINNYHHAHDAYLNAVVGTALIKKYPKLESEFVYGDYKVYDVRKMIAKSEQ

SEQ ID NO: 79 - protein, 1387 aa, Artificial Sequence
  Synthetic
NIMNFFKTEITLANGEIRKRPLIETNGETGEIVWDKGRDFATVRKVLSMPQVNIVKKTEVQTGGFSKESILPKRNSDKLIARKKDWDPKKYGGFDSPTVAYSVLVVAKVEKGKSKKLKSVKELLGITIMERSSFEKNPIDFLEAKGYKEVKKDLIIKLPKYSLFELENGRKRMLASAGELQKGNELALPSKYVNFLYLASHYEKLKGSPEDNEQKQLFVEQHKHYLDEIIEQISEFSKRVILADANLDKVLSAYNKHRDKPIREQAENIIHLFTLTNLGAPAAFKYFDTTIDRKRYTSTKEVLDATLIHQSITGLYETRIDLSQLGGDGGSGGSGGSGGSGGSGGSGGDKKYSIGLAIGTNSVGWAVITDEYKVPSKKFKVLGNTDRHSIKKNLIGALLFDSGETAEATRLKRTARRRYTRRKNRICYLQEIFSNEMAKVDDSFFHRLEESFLVEEDKKHERHPIFGNIVDEVAYHEKYPTIYHLRKKLVDSTDKADLRLIYLALAHMIKFRGHFLIEGDLNPDNSDVDKLFIQLVQTYNQLFEENPINASGVDAKAILSARLSKSRRLENLIAQLPGEKKNGLFGNLIALSLGLTPNFKSNFDLAEDAKLQLSKDTYDDDLDNLLAQIGDQYADLFLAAKNLSDAILLSDILRVNTEITKAPLSASMIKRYDEHHQDLTLLKALVRQQLPEKYKEIFFDQSKNGYAGYIDGGASQEEFYKFIKPILEKMDGTEELLVKLNREDLLRKQRTFDNGSIPHQIHLGELHAILRRQEDFYPFLKDNREKIEKILTFRIPYYVGPLARGNSRFAWMTRKSEETITPWNFEEVVDKGASAQSFIERMTNFDKNLPNEKVLPKHSLLYEYFTVYNELTKVKYVTEGMRKPAFLSGEQKKAIVDLLFKTNRKVTVKQLKEDYFKKIECFDSVEISGVEDRFNASLGTYHDLLKIIKDKDFLDNEENEDILEDIVLTLTLFEDREMIEERLKTYAHLFDDKVMKQLKRRRYTGWGRLSRKLINGIRDKQSGKTILDFLKSDGFANRNFMQLIHDDSLTFKEDIQKAQVSGQGDSLHEHIANLAGSPAIKKGILQTVKVVDELVKVMGRHKPENIVIEMARENQTTQKGQKNSRERMKRIEEGIKELGSQILKEHPVENTQLQNEKLYLYYLQNGRDMYVDQELDINRLSDYDVDHIVPQSFLKDDSIDNKVLTRSDKNRGKSDNVPSEEVVKKMKNYWRQLLNAKLITQRKFDNLTKAERGGLSELDKAGFIKRQLVETRQITKHVAQILDSRMNTKYDENDKLIREVKVITLKSKLVSDFRKDFQFYKVREINNYHHAHDAYLNAVVGTALIKKYPKLESEFVYGDYKVYDVRKMIAKSEQEIGKATAKYFFYS

SEQ ID NO: 80 - protein, 1388 aa, Artificial Sequence
  Synthetic
PEDNEQKQLFVEQHKHYLDEIIEQISEFSKRVILADANLDKVLSAYNKHRDKPIREQAENIIHLFTLTNLGAPAAFKYFDTTIDRKRYTSTKEVLDATLIHQSITGLYETRIDLSQLGGDGGSGGSGGSGGSGGSGGSGGMDKKYSIGLAIGTNSVGWAVITDEYKVPSKKFKVLGNTDRHSIKKNLIGALLFDSGETAEATRLKRTARRRYTRRKNRICYLQEIFSNEMAKVDDSFFHRLEESFLVEEDKKHERHPIFGNIVDEVAYHEKYPTIYHLRKKLVDSTDKADLRLIYLALAHMIKFRGHFLIEGDLNPDNSDVDKLFIQLVQTYNQLFEENPINASGVDAKAILSARLSKSRRLENLIAQLPGEKKNGLFGNLIALSLGLTPNFKSNFDLAEDAKLQLSKDTYDDDLDNLLAQIGDQYADLFLAAKNLSDAILLSDILRVNTEITKAPLSASMIKRYDEHHQDLTLLKALVRQQLPEKYKEIFFDQSKNGYAGYIDGGASQEEFYKFIKPILEKMDGTEELLVKLNREDLLRKQRTFDNGSIPHQIHLGELHAILRRQEDFYPFLKDNREKIEKILTFRIPYYVGPLARGNSRFAWMTRKSEETITPWNFEEVVDKGASAQSFIERMTNFDKNLPNEKVLPKHSLLYEYFTVYNELTKVKYVTEGMRKPAFLSGEQKKAIVDLLFKTNRKVTVKQLKEDYFKKIECFDSVEISGVEDRFNASLGTYHDLLKIIKDKDFLDNEENEDILEDIVLTLTLFEDREMIEERLKTYAHLFDDKVMKQLKRRRYTGWGRLSRKLINGIRDKQSGKTILDFLKSDGFANRNFMQLIHDDSLTFKEDIQKAQVSGQGDSLHEHIANLAGSPAIKKGILQTVKVVDELVKVMGRHKPENIVIEMARENQTTQKGQKNSRERMKRIEEGIKELGSQILKEHPVENTQLQNEKLYLYYLQNGRDMYVDQELDINRLSDYDVDHIVPQSFLKDDSIDNKVLTRSDKNRGKSDNVPSEEVVKKMKNYWRQLLNAKLITQRKFDNLTKAERGGLSELDKAGFIKRQLVETRQITKHVAQILDSRMNTKYDENDKLIREVKVITLKSKLVSDFRKDFQFYKVREINNYHHAHDAYLNAVVGTALIKKYPKLESEFVYGDYKVYDVRKMIAKSEQEIGKATAKYFFYSNIMNFFKTEITLANGEIRKRPLIETNGETGEIVWDKGRDFATVRKVLSMPQVNIVKKTEVQTGGFSKESILPKRNSDKLIARKKDWDPKKYGGFDSPTVAYSVLVVAKVEKGKSKKLKSVKELLGITIMERSSFEKNPIDFLEAKGYKEVKKDLIIKLPKYSLFELENGRKRMLASAGELQKGNELALPSKYVNFLYLASHYEKLKGS

SEQ ID NO: 81 - protein, 1387 aa, Artificial Sequence
  Synthetic
KPIREQAENIIHLFTLTNLGAPAAFKYFDTTIDRKRYTSTKEVLDATLIHQSITGLYETRIDLSQLGGDGGSGGSGGSGGSGGSGGSGGDKKYSIGLAIGTNSVGWAVITDEYKVPSKKFKVLGNTDRHSIKKNLIGALLFDSGETAEATRLKRTARRRYTRRKNRICYLQEIFSNEMAKVDDSFFHRLEESFLVEEDKKHERHPIFGNIVDEVAYHEKYPTIYHLRKKLVDSTDKADLRLIYLALAHMIKFRGHFLIEGDLNPDNSDVDKLFIQLVQTYNQLFEENPINASGVDAKAILSARLSKSRRLENLIAQLPGEKKNGLFGNLIALSLGLTPNFKSNFDLAEDAKLQLSKDTYDDDLDNLLAQIGDQYADLFLAAKNLSDAILLSDILRVNTEITKAPLSASMIKRYDEHHQDLTLLKALVRQQLPEKYKEIFFDQSKNGYAGYIDGGASQEEFYKFIKPILEKMDGTEELLVKLNREDLLRKQRTFDNGSIPHQIHLGELHAILRRQEDFYPFLKDNREKIEKILTFRIPYYVGPLARGNSRFAWMTRKSEETITPWNFEEVVDKGASAQSFIERMTNFDKNLPNEKVLPKHSLLYEYFTVYNELTKVKYVTEGMRKPAFLSGEQKKAIVDLLFKTNRKVTVKQLKEDYFKKIECFDSVEISGVEDRFNASLGTYHDLLKIIKDKDFLDNEENEDILEDIVLTLTLFEDREMIEERLKTYAHLFDDKVMKQLKRRRYTGWGRLSRKLINGIRDKQSGKTILDFLKSDGFANRNFMQLIHDDSLTFKEDIQKAQVSGQGDSLHEHIANLAGSPAIKKGILQTVKVVDELVKVMGRHKPENIVIEMARENQTTQKGQKNSRERMKRIEEGIKELGSQILKEHPVENTQLQNEKLYLYYLQNGRDMYVDQELDINRLSDYDVDHIVPQSFLKDDSIDNKVLTRSDKNRGKSDNVPSEEVVKKMKNYWRQLLNAKLITQRKFDNLTKAERGGLSELDKAGFIKRQLVETRQITKHVAQILDSRMNTKYDENDKLIREVKVITLKSKLVSDFRKDFQFYKVREINNYHHAHDAYLNAVVGTALIKKYPKLESEFVYGDYKVYDVRKMIAKSEQEIGKATAKYFFYSNIMNFFKTEITLANGEIRKRPLIETNGETGEIVWDKGRDFATVRKVLSMPQVNIVKKTEVQTGGFSKESILPKRNSDKLIARKKDWDPKKYGGFDSPTVAYSVLVVAKVEKGKSKKLKSVKELLGITIMERSSFEKNPIDFLEAKGYKEVKKDLIIKLPKYSLFELENGRKRMLASAGELQKGNELALPSKYVNFLYLASHYEKLKGSPEDNEQKQLFVEQHKHYLDEIIEQISEFSKRVILADANLDKVLSAYNKHRD

SEQ ID NO: 82 - protein, 357 aa, Artificial Sequence
  Synthetic
DYKVYDVRKMIAKSEQEIGKATAKYFFYSNIMNFFKTEITLANGEIRKRPLIETNGETGEIVWDKGRDFATVRKVLSMPQVNIVKKTEVQTGGFSKESILPKRNSDKLIARKKDWDPKKYGGFDSPTVAYSVLVVAKVEKGKSKKLKSVKELLGITIMERSSFEKNPIDFLEAKGYKEVKKDLIIKLPKYSLFELENGRKRMLASAGELQKGNELALPSKYVNFLYLASHYEKLKGSPEDNEQKQLFVEQHKHYLDEIIEQISEFSKRVILADANLDKVLSAYNKHRDKPIREQAENIIHLFTLTNLGAPAAFKYFDTTIDRKRYTSTKEVLDATLIHQSITGLYETRIDLSQLGGD

SEQ ID NO: 83 - protein, 341 aa, Artificial Sequence
  Synthetic
EIGKATAKYFFYSNIMNFFKTEITLANGEIRKRPLIETNGETGEIVWDKGRDFATVRKVLSMPQVNIVKKTEVQTGGFSKESILPKRNSDKLIARKKDWDPKKYGGFDSPTVAYSVLVVAKVEKGKSKKLKSVKELLGITIMERSSFEKNPIDFLEAKGYKEVKKDLIIKLPKYSLFELENGRKRMLASAGELQKGNELALPSKYVNFLYLASHYEKLKGSPEDNEQKQLFVEQHKHYLDEIIEQISEFSKRVILADANLDKVLSAYNKHRDKPIREQAENIIHLFTLTNLGAPAAFKYFDTTIDRKRYTSTKEVLDATLIHQSITGLYETRIDLSQLGGD

SEQ ID NO: 84 - protein, 328 aa, Artificial Sequence
  Synthetic
NIMNFFKTEITLANGEIRKRPLIETNGETGEIVWDKGRDFATVRKVLSMPQVNIVKKTEVQTGGFSKESILPKRNSDKLIARKKDWDPKKYGGFDSPTVAYSVLVVAKVEKGKSKKLKSVKELLGITIMERSSFEKNPIDFLEAKGYKEVKKDLIIKLPKYSLFELENGRKRMLASAGELQKGNELALPSKYVNFLYLASHYEKLKGSPEDNEQKQLFVEQHKHYLDEIIEQISEFSKRVILADANLDKVLSAYNKHRDKPIREQAENIIHLFTLTNLGAPAAFKYFDTTIDRKRYTSTKEVLDATLIHQSITGLYETRIDLSQLGGD

SEQ ID NO: 85 - protein, 120 aa, Artificial Sequence
  Synthetic
PEDNEQKQLFVEQHKHYLDEIIEQISEFSKRVILADANLDKVLSAYNKHRDKPIREQAENIIHLFTLTNLGAPAAFKYFDTTIDRKRYTSTKEVLDATLIHQSITGLYETRIDLSQLGGD

SEQ ID NO: 86 - protein, 69 aa, Artificial Sequence
  Synthetic
KPIREQAENIIHLFTLTNLGAPAAFKYFDTTIDRKRYTSTKEVLDATLIHQSITGLYETRIDLSQLGGD

SEQ ID NO: 87 - protein, 1367 aa, Artificial Sequence
  Synthetic
DKKYSIGLDIGTNSVGWAVITDEYKVPSKKFKVLGNTDRHSIKKNLIGALLFDSGETAEATRLKRTARRRYTRRKNRICYLQEIFSNEMAKVDDSFFHRLEESFLVEEDKKHERHPIFGNIVDEVAYHEKYPTIYHLRKKLVDSTDKADLRLIYLALAHMIKFRGHFLIEGDLNPDNSDVDKLFIQLVQTYNQLFEENPINASGVDAKAILSARLSKSRRLENLIAQLPGEKKNGLFGNLIALSLGLTPNFKSNFDLAEDAKLQLSKDTYDDDLDNLLAQIGDQYADLFLAAKNLSDAILLSDILRVNTEITKAPLSASMIKRYDEHHQDLTLLKALVRQQLPEKYKEIFFDQSKNGYAGYIDGGASQEEFYKFIKPILEKMDGTEELLVKLNREDLLRKQRTFDNGSIPHQIHLGELHAILRRQEDFYPFLKDNREKIEKILTFRIPYYVGPLARGNSRFAWMTRKSEETITPWNFEEVVDKGASAQSFIERMTNFDKNLPNEKVLPKHSLLYEYFTVYNELTKVKYVTEGMRKPAFLSGEQKKAIVDLLFKTNRKVTVKQLKEDYFKKIECFDSVEISGVEDRFNASLGTYHDLLKIIKDKDFLDNEENEDILEDIVLTLTLFEDREMIEERLKTYAHLFDDKVMKQLKRRRYTGWGRLSRKLINGIRDKQSGKTILDFLKSDGFANRNFMQLIHDDSLTFKEDIQKAQVSGQGDSLHEHIANLAGSPAIKKGILQTVKVVDELVKVMGRHKPENIVIEMARENQTTQKGQKNSRERMKRIEEGIKELGSQILKEHPVENTQLQNEKLYLYYLQNGRDMYVDQELDINRLSDYDVDAIVPQSFLKDDSIDNKVLTRSDKNRGKSDNVPSEEVVKKMKNYWRQLLNAKLITQRKFDNLTKAERGGLSELDKAGFIKRQLVETRQITKHVAQILDSRMNTKYDENDKLIREVKVITLKSKLVSDFRKDFQFYKVREINNYHHAHDAYLNAVVGTALIKKYPKLESEFVYGDYKVYDVRKMIAKSEQEIGKATAKYFFYSNIMNFFKTEITLANGEIRKRPLIETNGETGEIVWDKGRDFATVRKVLSMPQVNIVKKTEVQTGGFSKESILPKRNSDKLIARKKDWDPKKYGGFVSPTVAYSVLVVAKVEKGKSKKLKSVKELLGITIMERSSFEKNPIDFLEAKGYKEVKKDLIIKLPKYSLFELENGRKRMLASARELQKGNELALPSKYVNFLYLASHYEKLKGSPEDNEQKQLFVEQHKHYLDEIIEQISEFSKRVILADANLDKVLSAYNKHRDKPIREQAENIIHLFTLTNLGAPAAFKYFDTTIDRKQYRSTKEVLDATLIHQSITGLYETRIDLSQLGGD

SEQ ID NO: 88 - protein, 1367 aa, Artificial Sequence
  Synthetic
DKKYSIGLDIGTNSVGWAVITDEYKVPSKKFKVLGNTDRHSIKKNLIGALLFDSGETAEATRLKRTARRRYTRRKNRICYLQEIFSNEMAKVDDSFFHRLEESFLVEEDKKHERHPIFGNIVDEVAYHEKYPTIYHLRKKLVDSTDKADLRLIYLALAHMIKFRGHFLIEGDLNPDNSDVDKLFIQLVQTYNQLFEENPINASGVDAKAILSARLSKSRRLENLIAQLPGEKKNGLFGNLIALSLGLTPNFKSNFDLAEDAKLQLSKDTYDDDLDNLLAQIGDQYADLFLAAKNLSDAILLSDILRVNTEITKAPLSASMIKRYDEHHQDLTLLKALVRQQLPEKYKEIFFDQSKNGYAGYIDGGASQEEFYKFIKPILEKMDGTEELLVKLNREDLLRKQRTFDNGSIPHQIHLGELHAILRRQEDFYPFLKDNREKIEKILTFRIPYYVGPLARGNSRFAWMTRKSEETITPWNFEEVVDKGASAQSFIERMTNFDKNLPNEKVLPKHSLLYEYFTVYNELTKVKYVTEGMRKPAFLSGEQKKAIVDLLFKTNRKVTVKQLKEDYFKKIECFDSVEISGVEDRFNASLGTYHDLLKIIKDKDFLDNEENEDILEDIVLTLTLFEDREMIEERLKTYAHLFDDKVMKQLKRRRYTGWGRLSRKLINGIRDKQSGKTILDFLKSDGFANRNFMQLIHDDSLTFKEDIQKAQVSGQGDSLHEHIANLAGSPAIKKGILQTVKVVDELVKVMGRHKPENIVIEMARENQTTQKGQKNSRERMKRIEEGIKELGSQILKEHPVENTQLQNEKLYLYYLQNGRDMYVDQELDINRLSDYDVDAIVPQSFLKDDSIDNKVLTRSDKNRGKSDNVPSEEVVKKMKNYWRQLLNAKLITQRKFDNLTKAERGGLSELDKAGFIKRQLVETRQITKHVAQILDSRMNTKYDENDKLIREVKVITLKSKLVSDFRKDFQFYKVREINNYHHAHDAYLNAVVGTALIKKYPKLESEFVYGDYKVYDVRKMIAKSEQEIGKATAKYFFYSNIMNFFKTEITLANGEIRKRPLIETNGETGEIVWDKGRDFATVRKVLSMPQVNIVKKTEVQTGGFSKESILPKRNSDKLIARKKDWDPKKYGGFVSPTVAYSVLVVAKVEKGKSKKLKSVKELLGITIMERSSFEKNPIDFLEAKGYKEVKKDLIIKLPKYSLFELENGRKRMLASARELQKGNELALPSKYVNFLYLASHYEKLKGSPEDNEQKQLFVEQHKHYLDEIIEQISEFSKRVILADANLDKVLSAYNKHRDKPIREQAENIIHLFTLTNLGAPAAFKYFDTTIDRKEYRSTKEVLDATLIHQSITGLYETRIDLSQLGGD

SEQ ID NO: 89 - protein, 677 aa, Unknown
  MOLONEY MURINE LEUKEMIA VIRUS
TLNIEDEYRLHETSKEPDVSLGSTWLSDFPQAWAETGGMGLAVRQAPLIIPLKATSTPVSIKQYPMSQEARLGIKPHIQRLLDQGILVPCQSPWNTPLLPVKKPGTNDYRPVQDLREVNKRVEDIHPTVPNPYNLLSGLPPSHQWYTVLDLKDAFFCLRLHPTSQPLFAFEWRDPEMGISGQLTWTRLPQGFKNSPTLFDEALHRDLADFRIQHPDLILLQYVDDLLLAATSELDCQQGTRALLQTLGNLGYRASAKKAQICQKQVKYLGYLLKEGQRWLTEARKETVMGQPTPKTPRQLREFLGTAGFCRLWIPGFAEMAAPLYPLTKTGTLFNWGPDQQKAYQEIKQALLTAPALGLPDLTKPFELFVDEKQGYAKGVLTQKLGPWRRPVAYLSKKLDPVAAGWPPCLRMVAAIAVLTKDAGKLTMGQPLVILAPHAVEALVKQPPDRWLSNARMTHYQALLLDTDRVQFGPVVALNPATLLPLPEEGLQHNCLDILAEAHGTRPDLTDQPLPDADHTWYTDGSSLLQEGQRKAGAAVTTETEVIWAKALPAGTSAQRAELIALTQALKMAEGKKLNVYTDSRYAFATAHIHGEIYRRRGLLTSEGKEIKNKDEILALLKALFLPKRLSIIHCPGHQKGHSAEARGNRMADQAARKAAITETPDTSTLLIENSSP

SEQ ID NO: 90 - protein, 560 aa, Unknown
  MOLONEY MURINE LEUKEMIA VIRUS
  SITE (229)..(229): Xaa can be any naturally occurring amino acid
AFPLERPDWDYTTQAGRNHLVHYRQLLLAGLQNAGRSPTNLAKVKGITQGPNESPSAFLERLKEAYRRYTPYDPEDPGQETNVSMSFIWQSAPDIGRKLGRLEDLKSKTLGDLVREAEKIFNKRETPEEREERIRRETEEKEERRRTVDEQKEKERDRRRHREMSKLLATVVIGQEQDRQEGERKRPQLDKDQCAYCKEKGHWAKDCPKKPRGPRGPRPQTSLLTLGDXGGQGQDPPPEPRITLKVGGQPVTFLVDTGAQHSVLTQNPGPLSDKSAWVQGATGGKRYRWTTDRKVHLATGKVTHSFLHVPDCPYPLLGRDLLTKLKAQIHFEGSGAQVVGPMGQPLQVLTLNIEDEYRLHETSKEPDVSLGFTWLSDFPQAWAESGGMGLAVRQAPLIIPLKATSTPVSIKQYPMSQEARLGIKPHIQRLLDQGILVPCQSPWNTPLLPVKKPGTNDYRPVQDLREVNKRVEDIHPTVPNPYNLLSGLPPSHQWYTVLDLKDAFFCLRLHPTSQPLFAFEWRDPEMGISGQLTWTRLPQGFKNSPTLFDEALHRDLADFR

SEQ ID NO: 91 - protein, 669 aa, Unknown
  FELINE LEUKEMIA VIRUS
TLQLEEEYRLFEPESTQKQEMDIWLKNFPQAWAETGGMGTAHCQAPVLIQLKATATPISIRQYPMPHEAYQGIKPHIRRMLDQGILKPCQSPWNTPLLPVKKPGTEDYRPVQDLREVNKRVEDIHPTVPNPYNLLSTLPPSHPWYTVLDLKDAFFCLRLHSESQLLFAFEWRDPEIGLSGQLTWTRLPQGFKNSPTLFDEALHSDLADFRVRYPALVLLQYVDDLLLAAATRTECLEGTKALLETLGNKGYRASAKKAQICLQEVTYLGYSLKDGQRWLTKARKEAILSIPVPKNSRQVREFLGTAGYCRLWIPGFAELAAPLYPLTRPGTLFQWGTEQQLAFEDIKKALLSSPALGLPDITKPFELFIDENSGFAKGVLVQKLGPWKRPVAYLSKKLDTVASGWPPCLRMVAAIAILVKDAGKLTLGQPLTILTSHPVEALVRQPPNKWLSNARMTHYQAMLLDAERVHFGPTVSLNPATLLPLPSGGNHHDCLQILAETHGTRPDLTDQPLPDADLTWYTDGSSFIRNGEREAGAAVTTESEVIWAAPLPPGTSAQRAELIALTQALKMAEGKKLTVYTDSRYAFATTHVHGEIYRRRGLLTSEGKEIKNKNEILALLEALFLPKRLSIIHCPGHQKGDSPQAKGNRLADDTAKKAATETHSSLTVL

SEQ ID NO: 92 - protein, 559 aa, Artificial Sequence
  Synthetic
  SITE (280)..(280): Xaa can be any naturally occurring amino acid
PISPIETVPVKLKPGMDGPKVKQWPLTEEKIKALVEICTEMEKEGKISKIGPENPYNTPVFAIKKKDSTKWRKLVDFRELNKRTQDFWEVQLGIPHPAGLKKKKSVTVLDVGDAYFSVPLDEDFRKYTAFTIPSINNETPGIRYQYNVLPQGWKGSPAIFQSSMTKILEPFRKQNPDIVIYQYMDDLYVGSDLEIGQHRTKIEELRQHLLRWGLTTPDKKHQKEPPFLWMGYELHPDKWTVQPIVLPEKDSWTVNDIQKLVGKLNWASQIYPGIKVRQLXKLLRGTKALTEVIPLTEEAELELAENREILKEPVHGVYYDPSKDLIAEIQKQGQGQWTYQIYQEPFKNLKTGKYARMRGAHTNDVKQLTEAVQKITTESIVIWGKTPKFKLPIQKETWETWWTEYWQATWIPEWEFVNTPPLVKLWYQLEKEPIVGAETFYVDGAANRETKLGKAGYVTNRGRQKVVTLTDTTNQKTELQAIYLALQDSGLEVNIVTDSQYALGIIQAQPDQSESELVNQIIEQLIKKEKVYLAWVPAHKGIGGNEQVDKLVSAGIRKV

SEQ ID NO: 93 - protein, 440 aa, Artificial Sequence
  Synthetic
PISPIETVPVKLKPGMDGPKVKQWPLTEEKIKALVEICTEMEKEGKISKIGPENPYNTPVFAIKKKDSTKWRKLVDFRELNKRTQDFWEVQLGIPHPAGLKKKKSVTVLDVGDAYFSVPLDEDFRKYTAFTIPSINNETPGIRYQYNVLPQGWKGSPAIFQSSMTKILEPFRKQNPDIVIYQYMDDLYVGSDLEIGQHRTKIEELRQHLLRWGLTTPDKKHQKEPPFLWMGYELHPDKWTVQPIVLPEKDSWTVNDIQKLVGKLNWASQIYPGIKVRQLCKLLRGTKALTEVIPLTEEAELELAENREILKEPVHGVYYDPSKDLIAEIQKQGQGQWTYQIYQEPFKNLKTGKYARMRGAHTNDVKQLTEAVQKITTESIVIWGKTPKFKLPIQKETWETWWTEYWQATWIPEWEFVNTPPLVKLWYQLEKEPIVGAETF

SEQ ID NO: 94 - protein, 858 aa, Unknown
  ROUS SARCOMA VIRUS
TVALHLAIPLKWKPNHTPVWIDQWPLPEGKLVALTQLVEKELQLGHIEPSLSCWNTPVFVIRKASGSYRLLHDLRAVNAKLVPFGAVQQGAPVLSALPRGWPLMVLDLKDCFFSIPLAEQDREAFAFTLPSVNNQAPARRFQWKVLPQGMTCSPTICQLIVGQILEPLRLKHPSLRMLHYMDDLLLAASSHDGLEAAGEEVISTLERAGFTISPDKVQKEPGVQYLGYKLGSTYAAPVGLVAEPRIATLWDVQKLVGSLQWLRPALGIPPRLRGPFYEQLRGSDPNEAREWNLDMKMAWREIVQLSTTAALERWDPALPLEGAVARCEQGAIGVLGQGLSTHPRPCLWLFSTQPTKAFTAWLEVLTLLITKLRASAVRTFGKEVDILLLPACFRDELPLPEGILLALRGFAGKIRSSDTPSIFDIARPLHVSLKVRVTDHPVPGPTVFTDASSSTHKGVVVWREGPRWEIKEIADLGASVQQLEARAVAMALLLWPTTPTNVVTDSAFVAKMLLKMGQEGVPSTAAAFILEDALSQRSAMAAVLHVRSHSEVPGFFTEGNDVADSQATFQAYPLREAKDLHTALHIGPRALSKACNISMQQAREVVQTCPHCNSAPALEAGVNPRGLGPLQIWQTDFTLEPRMAPRSWLAVTVDTASSAIVVTQHGRVTSVAAQHHWATVIAVLGRPKAIKTDNGSCFTSKSTREWLARWGIAHTTGIPGNSQGQAMVERANRLLKDKIRVLAEGDGFMKRIPTSKQGELLAKAMYALNHFERGENTKTPIQKHWRPTVLTEGPPVKIRIETGEWEKGWNVLVWGRGYAAVKNRDTDKVIWVPSRKVKPDIAQKDEVTKKDEASPLFA

SEQ ID NO: 95 - protein, 675 aa, Unknown
  CAULIFLOWER MOSAIC VIRUS
MMDHLLQKTQIQNQTEQVMNITNPNSIYIKGRLYFKGYKKIELHCFVDTGASLCIASKFVIPEEHWINAERPIMVKIADGSSITINKVCRDIDLIIAGEIFHIPTVYQQESGIDFIIGNNFCQLYEPFIQFTDRVIFTKDRTYPVHIAKLTRAVRVGTEGFLESMKKRSKTQQPEPVNISTNKIAILSEGRRLSEEKLFITQQRMQKIEELLEKVCSENPLDPNKTKQWMKASIKLSDPSKAIKVKPMKYSPMDREEFDKQIKELLDLKVIKPSKSPHMAPAFLVNNEAEKRRGKKRMVVNYKAMNKATVGDAYNLPNKDELLTLIRGKKIFSSFDCKSGFWQVLLDQDSRPLTAFTCPQGHYEWNVVPFGLKQAPSIFQRHMDEAFRVFRKFCCVYVDDILVFSNNEEDHLLHVAMILQKCNQHGIILSKKKAQLFKKKINFLGLEIDEGTHKPQGHILEHINKFPDTLEDKKQLQRFLGILTYASDYIPKLAQIRKPLQAKLKENVPWKWTKEDTLYMQKVKKNLQGFPPLHHPLPEEKLIIETDASDDYWGGMLKAIKINEGTNTELICRYASGSFKAAEKNYHSNDKETLAVINTIKKFSIYLTPVHFLIRTDNTHFKSFVNLNYKGDSKLGRNIRWQAWLSHYSFDVEHIKGTDNHFADFLSREFNRVNS

SEQ ID NO: 96 - protein, 366 aa, Unknown
  KLEBSIELLA PNEUMONIA
MKEKISKIDKNFYTDIFIKTSFQNEFEAGGVIPPIAKNQVSTISNKNKTFYSLAHSSPHYSIQTRIEKFLLKNIPLSASSFAFRKERSYLHYLEPHTQNVKYCHLDIVSFFHSIDVNIVRDTFSVYFSDEFLVKEKQSLLDAFMASVTLTAELDGVEKTFIPMGFKSSPSISNIIFRKIDILIQKFCDKNKITYTRYADDLLFSTKKENNILSSTFFINEISSILSINKFKLNKSKYLYKEGTISLGGYVIENILKDNSSGNIRLSSSKLNPLYKALYEIKKGSSSKHICIKVFNLKLKRFIYKKNKEKFEAKFYSSQLKNKLLGYRSYLLSFVIFHKKYKCINPIFLEKCVFLISEIESIMNRKF

SEQ ID NO: 97 - protein, 263 aa, E. Coli
MKITSNNVTAVINGKGWHSINWKKCHQHVKTIQTRIAKAACNQQWRTVGRLQRLLVRSFSARALAVKRVTENSGRKTPGVDGQIWSTPESKWEAIFKLRRKGYKPLPLKRVFIPKSNGKKRPLGIPVMLDRAMQALHLLGLEPVSETNADHNSYGFRPARCTADAIQQVCNMYSSRNASKWVLEGDIKGCFEHISHEWLLENIPMDKQILRNWLKAGIIEKSIFSKTLSGTPQGGIISPVLANMALDGLERLLQNRFGRNRLI

SEQ ID NO: 98 - protein, 438 aa, BACILLUS SUBTILIS
MSKIKINYEKYHIKPFPHFDQRIKVNKKVKENLQNPFYIAAHSFYPFIHYKKISYKFKNGTLSSPKERDIFYSGHMDGYIYKHYGEILNHKYNNTCIGKGIDHVSLAYRNNKMGKSNIHFAAEVINFISEQQQAFIFVSDFSSYFDSLDHAILKEKLIEVLEEQDKLSKDWWNVFKHITRYNWVEKEEVISDLECTKEKIARDKKSRERYYTPAEFREFRKRVNIKSNDTGVGIPQGTAISAVLANVYAIDLDQKLNQYALKYGGIYRRYSDDIIMVLPMTSDGQDPSNDHVSFIKSVVKRNKVTMGDSKTSVLYYANNNIYEDYQRKRESKMDYLGFSFDGMTVKIREKSLFKYYHRTYKKINSINWASVKKEKKVGRKKLYLLYSHLGRNYKGHGNFISYCKKAHAVFEGNKKIESLINQQIKRHWKKIQKRLVDV

SEQ ID NO: 99 - protein, 426 aa, Artificial Sequence
  Synthetic
DTSNLMEQILSSDNLNRAYLQVVRNKGAEGVDGMKYTELKEHLAKNGETIKGQLRTRKYKPQPARRVEIPKPDGGVRNLGVPTVTDRFIQQAIAQVLTPIYEEQFHDHSYGFRPNRCAQQAILTALNIMNDGNDWIVDIDLEKFFDTVNHDKLMTLIGRTIKDGDVISIVRKYLVSGIMIDDEYEDSIVGTPQGGNLSPLLANIMLNELDKEMEKRGLNFVRYADDCIIMVGSEMSANRVMRNISRFIEEKLGLKVNMTKSKVDRPSGLKYLGFGFYFDPRAHQFKAKPHAKSVAKFKKRMKELTCRSWGVSNSYKVEKLNQLIRGWINYFKIGSMKTLCKELDSRIRYRLRMCIWKQWKTPQNQEKNLVKLGIDRNTARRVAYTGKRIAYVCNKGAVNVAISNKRLASFGLISMLDYYIEKCVTC

SEQ ID NO: 100 - protein, 412 aa, Artificial Sequence
  Synthetic
ALLERILARDNLITALKRVEANQGAPGIDGVSTDQLRDYIRAHWSTIHAQLLAGTYRPAPVRRVEIPKPGGGTRQLGIPTVVDRLIQQAILQELTPIFDPDFSSSSFGFRPGRNAHDAVRQAQGYIQEGYRYVVDMDLEKFFDRVNHDILMSRVARKVKDKRVLKLIRAYLQAGVMIEGVKVQTEEGTPQGGPLSPLLANILLDDLDKELEKRGLKFCRYADDCNIYVKSLRAGQRVKQSIQRFLEKTLKLKVNEEKSAVDRPWKRAFLGFSFTPERKARIRLAPRSIQRLKQRIRQLTNPNWSISMPERIHRVNQYVMGWIGYFRLVETPSVLQTIEGWIRRRLRLCQWLQWKRVRTRIRELRALGLKETAVMEIANTRKGAWRTTKTPQLHQALGKTYWTAQGLKSLTQR

SEQ ID NO: 101 - RNA, 126 nt, Artificial Sequence
  Synthetic
uacaccaucacggucuaugcguuuuagagcuagaaauagcaaguuaaaauaaggcuaguccguuaucaacuugaaaaaguggcaccgagucggugcuaucuucgccccaugcauagaccgugaugg

SEQ ID NO: 102 - RNA, 126 nt, Artificial Sequence
  Synthetic
cgcgucgcgcucgucagaucguuuuagagcuagaaauagcaaguuaaaauaaggcuaguccguuaucaacuugaaaaaguggcaccgagucggugcuuuccgccuaccugcaucugacgagcgcga

SEQ ID NO: 103 - RNA, 132 nt, Artificial Sequence
  Synthetic
aucggagaauacaugaacauguuuuagagcuagaaauagcaaguuaaaauaaggcuaguccguuaucaacuugaaaaaguggcaccgagucggugccggagaauacaugaacaucggacccgcgcuaucuuc

SEQ ID NO: 104 - RNA, 126 nt, Artificial Sequence
  Synthetic
  misc_feature (107)..(109): n is a, c, g, or u
uacaccaucacggucuaugcguuuuagagcuagaaauagcaaguuaaaauaaggcuaguccguuaucaacuugaaaaaguggcaccgagucggugcuaucuucgccnnnugcauagaccgugaugg

SEQ ID NO: 105 - RNA, 126 nt, Artificial Sequence
  Synthetic
uacaccaucacggucuaugcguuuuagagcuagaaauagcaaguuaaaauaaggcuaguccguuaucaacuugaaaaaguggcaccgagucggugcgggggggggggggugcauagaccgugaugg

SEQ ID NO: 106 - protein, 677 aa, Artificial Sequence
  Synthetic
TLNIEDEYRLHETSKEPDVSLGSTWLSDFPQAWAETGGMGLAVRQAPLIIPLKATSTPVSIKQYPMSQEARLGIKPHIQRLLDQGILVPCQSPWNTPLLPVKKPGTNDYRPVQDLREVNKRVEDIHPTVPNPYNLLSGLPPSHQWYTVLDLKDAFFCLRLHPTSQPLFAFEWRDPEMGISGQLTWTRLPQGFKNSPTLFNEALHRDLADFRIQHPDLILLQYVDDLLLAATSELDCQQGTRALLQTLGNLGYRASAKKAQICQKQVKYLGYLLKEGQRWLTEARKETVMGQPTPKTPRQLREFLGTAGFCRLWIPGFAEMAAPLYPLTKTGTLFNWGPDQQKAYQEIKQALLTAPALGLPDLTKPFELFVDEKQGYAKGVLTQKLGPWRRPVAYLSKKLDPVAAGWPPCLRMVAAIAVLTKDAGKLTMGQPLVILAPHAVEALVKQPPDRWLSNARMTHYQALLLDTDRVQFGPVVALNPATLLPLPEEGLQHNCLDILAEAHGTRPDLTDQPLPDADHTWYTDGSSLLQEGQRKAGAAVTTETEVIWAKALPAGTSAQRAELIALTQALKMAEGKKLNVYTDSRYAFATAHIHGEIYRRRGLLTSEGKEIKNKDEILALLKALFLPKRLSIIHCPGHQKGHSAEARGNRMADQAARKAAITETPDTSTLLIENSSP

SEQ ID NO: 107 - protein, 677 aa, Artificial Sequence
  Synthetic
TLNIEDEYRLHETSKEPDVSLGSTWLSDFPQAWAETGGMGLAVRQAPLIIPLKATSTPVSIKQYPMSQEARLGIKPHIQRLLDQGILVPCQSPWNTPLLPVKKPGTNDYRPVQDLREVNKRVEDIHPTVPNPYNLLSGLPPSHQWYTVLDLKDAFFCLRLHPTSQPLFAFEWRDPEMGISGQLTWTRLPQGFKNSPTLFNEALHRDLADFRIQHPDLILLQYVDDLLLAATSELDCQQGTRALLQTLGNLGYRASAKKAQICQKQVKYLGYLLKEGQRWLTEARKETVMGQPTPKTPRQLREFLGTAGFCRLWIPGFAEMAAPLYPLTKPGTLFNWGPDQQKAYQEIKQALLTAPALGLPDLTKPFELFVDEKQGYAKGVLTQKLGPWRRPVAYLSKKLDPVAAGWPPCLRMVAAIAVLTKDAGKLTMGQPLVILAPHAVEALVKQPPDRWLSNARMTHYQALLLDTDRVQFGPVVALNPATLLPLPEEGLQHNCLDILAEAHGTRPDLTDQPLPDADHTWYTDGSSLLQEGQRKAGAAVTTETEVIWAKALPAGTSAQRAELIALTQALKMAEGKKLNVYTDSRYAFATAHIHGEIYRRRGLLTSEGKEIKNKDEILALLKALFLPKRLSIIHCPGHQKGHSAEARGNRMADQAARKAAITETPDTSTLLIENSSP

SEQ ID NO: 108 - protein, 677 aa, Artificial Sequence
  Synthetic
TLNIEDEYRLHETSKEPDVSLGSTWLSDFPQAWAETGGMGLAVRQAPLIIPLKATSTPVSIKQYPMSQEARLGIKPHIQRLLDQGILVPCQSPWNTPLLPVKKPGTNDYRPVQDLREVNKRVEDIHPTVPNPYNLLSGLPPSHQWYTVLDLKDAFFCLRLHPTSQPLFAFEWRDPEMGISGQLTWTRLPQGFKNSPTLFNEALHRDLADFRIQHPDLILLQYVDDLLLAATSELDCQQGTRALLQTLGNLGYRASAKKAQICQKQVKYLGYLLKEGQRWLTEARKETVMGQPTPKTPRQLREFLGTAGFCRLWIPGFAEMAAPLYPLTKPGTLFNWGPDQQKAYQEIKQALLTAPALGLPDLTKPFELFVDEKQGYAKGVLTQKLGPWRRPVAYLSKKLDPVAAGWPPCLRMVAAIAVLTKDAGKLTMGQPLVILAPHAVEALVKQPPDRWLSNARMTHYQALLLDTDRVQFGPVVALNPATLLPLPEEGLQHNCLDILAEAHGTRPDLTDQPLPDADHTWYTDGSSLLQEGQRKAGAAVTTETEVIWAKALPAGTSAQRAELIALTQALKMAEGKKLNVYTDSRYAFATAHIHGEIYRRRGWLTSEGKEIKNKDEILALLKALFLPKRLSIIHCPGHQKGHSAEARGNRMADQAARKAAITETPDTSTLLIENSSP

SEQ ID NO: 109 - protein, 677 aa, Artificial Sequence
  Synthetic
TLNIEDEYRLHETSKEPDVSLGSTWLSDFPQAWAETGGMGLAVRQAPLIIPLKATSTPVSIKQYPMSQKARLGIKPHIQRLLDQGILVPCQSPWNTPLLPVKKPGTNDYRPVQDLREVNKRVEDIHPTVPNPYNLLSGLPPSHQWYTVLDLKDAFFCLRLHPTSQPLFAFEWRDPEMGISGQLTWTRLPQGFKNSPTLFNEALHRDLADFRIQHPDLILLQYVDDLLLAATSELDCQQGTRALLQTLGNLGYRASAKKAQICQKQVKYLGYLLKEGQRWLTEARKETVMGQPTPKTPRQLREFLGTAGFCRLWIPGFAEMAAPLYPLTKPGTLFNWGPDQQKAYQEIKQALLTAPALGLPDLTKPFELFVDEKQGYAKGVLTQKLGPWRRPVAYLSKKLDPVAAGWPPCLRMVAAIAVLTKDAGKLTMGQPLVILAPHAVEALVKQPPDRWLSNARMTHYQALLLDTDRVQFGPVVALNPATLLPLPEEGLQHNCLDILAEAHGTRPDLTDQPLPDADHTWYTDGSSLLQEGQRKAGAAVTTETEVIWAKALPAGTSAQRAELIALTQALKMAEGKKLNVYTDSRYAFATAHIHGEIYRRRGWLTSEGKEIKNKDEILALLKALFLPKRLSIIHCPGHQKGHSAEARGNRMADQAARKAAITETPDTSTLLIENSSP

SEQ ID NO: 110 - protein, 677 aa, Artificial Sequence
  Synthetic
TLNIEDEYRLHETSKEPDVSLGSTWLSDFPQAWAETGGMGLAVRQAPLIIPLKATSTPVSIKQYPMSQEARLGIKPHIQRLLDQGILVPCQSPWNTPLLPVKKPGTNDYRPVQDLREVNKRVEDIHPTVPNPYNLLSGLPPSHQWYTVLDLKDAFFCLRLHPTSQPLFAFEWRDPEMGISGQLTWTRLPQGFKNSPTLFNEALHRDLADFRIQHPDLILLQYVDDLLLAATSELDCQQGTRALLQTLGNLGYRASAKKAQICQKQVKYLGYLLKEGQRWLTEARKETVMGQPTPKTPRQLRRFLGTAGFCRLWIPGFAEMAAPLYPLTKPGTLFNWGPDQQKAYQEIKQALLTAPALGLPDLTKPFELFVDEKQGYAKGVLTQKLGPWRRPVAYLSKKLDPVAAGWPPCLRMVAAIAVLTKDAGKLTMGQPLVILAPHAVEALVKQPPDRWLSNARMTHYQALLLDTDRVQFGPVVALNPATLLPLPEEGLQHNCLDILAEAHGTRPDLTDQPLPDADHTWYTDGSSLLQEGQRKAGAAVTTETEVIWAKALPAGTSAQRAELIALTQALKMAEGKKLNVYTDSRYAFATAHIHGEIYRRRGWLTSEGKEIKNKDEILALLKALFLPKRLSIIHCPGHQKGHSAEARGNRMADQAARKAAITETPDTSTLLIENSSP

SEQ ID NO: 111 - protein, 677 aa, Artificial Sequence
  Synthetic
TLNIEDEYRLHETSKEPDVSLGSTWLSDFPQAWAETGGMGLAVRQAPLIIPLKATSTPVSIKQYPMSQEARLGIKPHIQRLLDQGILVPCQSPWNTPLLPVKKPGTNDYRPVQDLREVNKRVEDIHPTVPNPYNLLSGLPPSHQWYTVLDLKDAFFCLRLHPTSQPLFAFEWRDPEMGISGQLTWTRLPQGFKNSPTLFNEALHRDLADFRIQHPDLILLQYVDDLLLAATSELDCQQGTRALLQTLGNLGYRASAKKAQICQKQVKYLGYLLKEGQRWLTEARKETVMGQPTPKTPRQLREFLGTAGFCRLWIPGFAEMAAPLYPLTKPGTLFNWGPDQQKAYQEIKQALLTAPALGLPDLTKPFELFVDEKQGYAKGVLTQKLGPWRRPVAYLSKKLDPVAAGWPPCLRMVAAIAVLTKDAGKLTMGQPLVILAPHAVEALVKQPPDRWLSNARMTHYQALLLDTDRVQFGPVVALNPATLLPLPEEGLQHNCLDILAEAHGTRPDLTDQPLPDADHTWYTDGSSLLQEGQRKAGAAVTTETEVIWAKALPAGTSAQRAELIALTQALKMAEGKKLNVYTDSRYAFATAHIHGEIYRRRGWLTSKGKEIKNKDEILALLKALFLPKRLSIIHCPGHQKGHSAEARGNRMADQAARKAAITETPDTSTLLIENSSP

SEQ ID NO: 112 - protein, 677 aa, Artificial Sequence
  Synthetic
TLNIEDEYRLHETSKEPDVSLGSTWLSDFPQAWAETGGMGLAVRQAPLIIPLKATSTPVSIKQYPMSQEARLGIKPHIQRLLDQGILVPCQSPWNTPLLPVKKPGTNDYRPVQDLREVNKRVEDIHPTVPNPYNLLSGPPPSHQWYTVLDLKDAFFCLRLHPTSQPLFAFEWRDPEMGISGQLTWTRLPQGFKNSPTLFNEALHRDLADFRIQHPDLILLQYVDDLLLAATSELDCQQGTRALLQTLGNLGYRASAKKAQICQKQVKYLGYLLKEGQRWLTEARKETVMGQPTPKTPRQLREFLGTAGFCRLWIPGFAEMAAPLYPLTKPGTLFNWGPDQQKAYQEIKQALLTAPALGLPDLTKPFELFVDEKQGYAKGVLTQKLGPWRRPVAYLSKKLDPVAAGWPPCLRMVAAIAVLTKDAGKLTMGQPLVILAPHAVEALVKQPPDRWLSNARMTHYQALLLDTDRVQFGPVVALNPATLLPLPEEGLQHNCLDILAEAHGTRPDLTDQPLPDADHTWYTDGSSLLQEGQRKAGAAVTTETEVIWAKALPAGTSAQRAELIALTQALKMAEGKKLNVYTDSRYAFATAHIHGEIYRRRGWLTSEGKEIKNKDEILALLKALFLPKRLSIIHCPGHQKGHSAEARGNRMADQAARKAAITETPDTSTLLIENSSP

SEQ ID NO: 113 - protein, 677 aa, Artificial Sequence
  Synthetic
TLNIEDEYRLHETSKEPDVSLGSTWLSDFPQAWAETGGMGLAVRQAPLIIPLKATSTPVSIKQYPMSQEARLGIKPHIQRLLDQGILVPCQSPWNTPLLPVKKPGTNDYRPVQDLREVNKRVEDIHPTVPNPYNLLSGLPPSHQWYTVLDLKDAFFCLRLHPTSQPLFAFEWRDPEMGISGQLTWTRLPQGFKNSPTLFNEALHRDLADFRIQHPDLILLQYVDDLLLAATSELDCQQGTRALLQTLGNLGYRASAKKAQICQKQVKYLGYLLKEGQRWLTEARKETVMGQPTPKTPRQLREFLGTAGFCRLWIPGFAEMAAPLYPLTKPGTLFNWGPDQQKAYQEIKQALLTAPALGLPDLTKPFELFVDEKQGYAKGVLTQKLGPWRRPVAYLSKKLDPVAAGWPPCLRMVAAIAVLTKDAGKLTMGQPLVIGAPHAVEALVKQPPDRWLSNARMTHYQALLLDTDRVQFGPVVALNPATLLPLPEEGLQHNCLDILAEAHGTRPDLTDQPLPDADHTWYTDGSSLLQEGQRKAGAAVTTETEVIWAKALPAGTSAQRAELIALTQALKMAEGKKLNVYTDSRYAFATAHIHGEIYRRRGWLTSEGKEIKNKDEILALLKALFLPKRLSIIHCPGHQKGHSAEARGNRMADQAARKAAITETPDTSTLLIENSSP

SEQ ID NO: 114 - protein, 677 aa, Artificial Sequence
  Synthetic
TLNIEDEYRLHETSKEPDVSLGSTWLSDFPQAWAETGGMGLAVRQAPLIIPLKATSTPVSIKQYPMSQEARLGIKPHIQRLLDQGILVPCQSPWNTPLLPVKKPGTNDYRPVQDLREVNKRVEDIHPTVPNPYNLLSGLPPSHQWYTVLDLKDAFFCLRLHPTSQPLFAFEWRDPEMGISGQLTWTRLPQGFKNSPTLFNEALHRDLADFRIQHPDLILLQYVDDLLLAATSELDCQQGTRALLQTLGNLGYRASAKKAQICQKQVKYLGYLLKEGQRWLTEARKETVMGQPTPKTPRQLREFLGTAGFCRLWIPGFAEMAAPLYPLTKPGTLFNWGPDQQKAYQEIKQALLTAPALGLPDLTKPFELFVDEKQGYAKGVLTQKLGPWRRPVAYLSKKLDPVAAGWPPCLRMVAAIAVLTKDAGKLTMGQPLVILAPHAVEALVKQPPDRWLSKARMTHYQALLLDTDRVQFGPVVALNPATLLPLPEEGLQHNCLDILAEAHGTRPDLTDQPLPDADHTWYTDGSSLLQEGQRKAGAAVTTETEVIWAKALPAGTSAQRAELIALTQALKMAEGKKLNVYTDSRYAFATAHIHGEIYRRRGWLTSEGKEIKNKDEILALLKALFLPKRLSIIHCPGHQKGHSAEARGNRMADQAARKAAITETPDTSTLLIENSSP

SEQ ID NO: 115 - protein, 677 aa, Artificial Sequence
  Synthetic
TLNIEDEYRLHETSKEPDVSLGSTWLSDFPQAWAETGGMGLAVRQAPLIIPLKATSTPVSIKQYPMSQEARLGIKPHIQRLLDQGILVPCQSPWNTPLLPVKKPGTNDYRPVQDLREVNKRVEDIHPTVPNPYNLLSGLPPSHQWYTVLDLKDAFFCLRLHPTSQPLFAFEWRDPEMGISGQLTWTRLPQGFKNSPTLFNEALHRDLADFRIQHPDLILLQYVDDLLLAATSELDCQQGTRALLQTLGNLGYRASAKKAQICQKQVKYLGYLLKEGQRWLTEARKETVMGQPTPKTPRQLREFLGKAGFCRLWIPGFAEMAAPLYPLTKPGTLFNWGPDQQKAYQEIKQALLTAPALGLPDLTKPFELFVDEKQGYAKGVLTQKLGPWRRPVAYLSKKLDPVAAGWPPCLRMVAAIAVLTKDAGKLTMGQPLVILAPHAVEALVKQPPDRWLSNARMTHYQALLLDTDRVQFGPVVALNPATLLPLPEEGLQHNCLDILAEAHGTRPDLTDQPLPDADHTWYTDGSSLLQEGQRKAGAAVTTETEVIWAKALPAGTSAQRAELIALTQALKMAEGKKLNVYTDSRYAFATAHIHGEIYRRRGWLTSEGKEIKNKDEILALLKALFLPKRLSIIHCPGHQKGHSAEARGNRMADQAARKAAITETPDTSTLLIENSSP

SEQ ID NO: 116 - protein, 677 aa, Artificial Sequence
  Synthetic
TLNIEDEYRLHETSKEPDVSLGSTWLSDFPQAWAETGGMGLAVRQAPLIIPLKATSTPVSIKQYPMSQEARLGIKPHIQRLLDQGILVPCQSPWNTPLLPVKKPGTNDYRPVQDLREVNKRVEDIHPTVPNPYNLLSGLPPSHQWYTVLDLKDAFFCLRLHPTSQPLFAFEWRDPEMGISGQLTWTRLPQGFKNSPTLFNEALHRDLADFRIQHPDLILLQYVDDLLLAATSELDCQQGTRALLQTLGNLGYRASAKKAQICQKQVKYLGYLLKEGQRWLTEARKETVMGQPTPKTPRQLREFLGTAGFCRLFIPGFAEMAAPLYPLTKPGTLFNWGPDQQKAYQEIKQALLTAPALGLPDLTKPFELFVDEKQGYAKGVLTQKLGPWRRPVAYLSKKLDPVAAGWPPCLRMVAAIAVLTKDAGKLTMGQPLVILAPHAVEALVKQPPDRWLSNARMTHYQALLLDTDRVQFGPVVALNPATLLPLPEEGLQHNCLDILAEAHGTRPDLTDQPLPDADHTWYTDGSSLLQEGQRKAGAAVTTETEVIWAKALPAGTSAQRAELIALTQALKMAEGKKLNVYTDSRYAFATAHIHGEIYRRRGWLTSEGKEIKNKDEILALLKALFLPKRLSIIHCPGHQKGHSAEARGNRMADQAARKAAITETPDTSTLLIENSSP

SEQ ID NO: 117 - protein, 677 aa, Artificial Sequence
  Synthetic
TLNIEDEYRLHETSKEPDVSLGSTWLSDFPQAWAETGGMGLAVRQAPLIIPLKATSTPVSIKQYPMSQEARLGIKPHIQRLLDQGILVPCQSPWNTPLLPVKKPGTNDYRPVQDLREVNKRVEDIHPTVPNPYNLLSGLPPSHQWYTVLDLKDAFFCLRLHPTSQPLFAFEWRDPEMGISGQLTWTRLPQGFKNSPTLFNEALHRDLADFRIQHPDLILLQYVDDLLLAATSELDCQQGTRALLQTLGNLGYRASAKKAQICQKQVKYLGYLLKEGQRWLTEARKETVMGQPTPKTPRQLREFLGTAGFCRLWIPGFAEMAAPLYPLTKPGTLFNWGPDQQKAYQEIKQALLTAPALGLPDLTKPFELFVDEKQGYAKGVLTQKLGPWRRPVAYLSKKLDPVAAGWPPCLRMVAAIAVLTKDAGKLTMGQPLVILAPHAVEALVKQPPDRWLSNARMTHYQALLLDTDRVQFGPVVALNPATLLPLPEEGLQHNCLDILAEAHGTRPDLTDQPLPDADHTWYTGGSSLLQEGQRKAGAAVTTETEVIWAKALPAGTSAQRAQLIALTQALKMAEGKKLNVYTNSRYAFATAHIHGEIYRRRGWLTSEGKEIKNKDEILALLKALFLPKRLSIIHCPGHQKGHSAEARGNRMADQAARKAAITETPDTSTLLIENSSP

SEQ ID NO: 118 - protein, 677 aa, Artificial Sequence
  Synthetic
TLNIEDEYRLHETSKEPDVSLGSTWLSDFPQAWAETGGMGLAVRQAPLIIPLKATSTPVSIKQYPMSQEARLGIKPHIQRLLDQGILVPCQSPWNTPLLPVKKPGTNDYRPVQDLREVNKRVEDIHPTVPNPYNLLSGLPPSHQWYTVLDLKDAFFCLRLHPTSQPLFAFEWRDPEMGISGQLTWTRLPQGFKNSPTLFNEALHRDLADFRIQHPDLILLQYVDDLLLAATSELDCQQGTRALLQTLGNLGYRASAKKAQICQKQVKYLGYLLKEGQRWLTEARKETVMGQPTPKTPRQLRRFLGTAGFCRLFIPGFAEMAAPLYPLTKPGTLFNWGPDQQKAYQEIKQALLTAPALGLPDLTKPFELFVDEKQGYAKGVLTQKLGPWRRPVAYLSKKLDPVAAGWPPCLRMVAAIAVLTKDAGKLTMGQPLVILAPHAVEALVKQPPDRWLSNARMTHYQALLLDTDRVQFGPVVALNPATLLPLPEEGLQHNCLDILAEAHGTRPDLTDQPLPDADHTWYTDGSSLLQEGQRKAGAAVTTETEVIWAKALPAGTSAQRAELIALTQALKMAEGKKLNVYTDSRYAFATAHIHGEIYRRRGWLTSEGKEIKNKDEILALLKALFLPKRLSIIHCPGHQKGHSAEARGNRMADQAARKAAITETPDTSTLLIENSSP

SEQ ID NO: 119 - protein, 677 aa, Artificial Sequence
  Synthetic
TLNIEDEYRLHETSKEPDVSLGSTWLSDFPQAWAETGGMGLAVRQAPLIIPLKATSTPVSIKQYPMSQEARLGIKPHIQRLLDQGILVPCQSPWNTPLLPVKKPGTNDYRPVQDLREVNKRVEDIHPTVPNPYNLLSGPPPSHQWYTVLDLKDAFFCLRLHPTSQPLFAFEWRDPEMGISGQLTWTRLPQGFKNSPTLFNEALHRDLADFRIQHPDLILLQYVDDLLLAATSELDCQQGTRALLQTLGNLGYRASAKKAQICQKQVKYLGYLLKEGQRWLTEARKETVMGQPTPKTPRQLREFLGTAGFCRLWIPGFAEMAAPLYPLTKPGTLFNWGPDQQKAYQEIKQALLTAPALGLPDLTKPFELFVDEKQGYAKGVLTQKLGPWRRPVAYLSKKLDPVAAGWPPCLRMVAAIAVLTKDAGKLTMGQPLVILAPHAVEALVKQPPDRWLSNARMTHYQALLLDTDRVQFGPVVALNPATLLPLPEEGLQHNCLDILAEAHGTRPDLTDQPLPDADHTWYTDGSSLLQEGQRKAGAAVTTETEVIWAKALPAGTSAQRAELIALTQALKMAEGKKLNVYTDSRYAFATAHIHGEIYRRRGWLTSKGKEIKNKDEILALLKALFLPKRLSIIHCPGHQKGHSAEARGNRMADQAARKAAITETPDTSTLLIENSSP

SEQ ID NO: 120 - protein, 677 aa, Artificial Sequence
  Synthetic
TLNIEDEYRLHETSKEPDVSLGSTWLSDFPQAWAETGGMGLAVRQAPLIILLKATSTPVSIKQYPMKQEARLGIKPHIQRLLDQGILVPCQSPWNTPLLPVKKPGTNDYRPVQDLREVNKRVEDIHPTVPNPYNLLSGLPPSHQWYTVLDLKDAFFCLRLHPTSQPLFAFEWRDPEMGISGQLTWTRLPQGFKNSPALFDEALRRDLADFRIQHPDLILLQYVDDLLLAATSELDCQQGTRALLQTLGNLGYRASAKKAQICQKQVKYLGYLLKEGQRWLTEARKETVMGQPTPKTPRQLRKFLGTAGNCRLFIPGFAEMAAPLYPLTKPGTLFNWGPDQQKAYQEIKQALLTAPALGLPDLTKPFELFVDEKQGYAKGVLTQKLGPWRRPVAYLSKKLDPVAAGWPPCLRMVAAIAVLTKDAGKLTMGQPLVIGAPHAVEALVKQPPDRWLSKARMTHYQALLLDTDRVQFGPVVALNPATLLPLPEEGLQHNCLDILAEAHGTRPDLTDQPLPDADHTWYTGGSSLLQEGQRKAGAAVTTETEVIWAKALPAGTSAQRAELIALTQALKMAEGKKLNVYTNSRYAFATAHIQGEIYRRRGLLTSEGKEIKNKDEILALLKALFLPKRLSIIHCPGHQKGHSAEARGNRMANQAARKAAITETPDTSTLLIENSSP

SEQ ID NO: 121 - protein, 677 aa, Artificial Sequence
  Synthetic
TLNIEDEYRLHETSKEPDVSLGSTWLSDFPQAWAETGGMGLAVRQAPLIILLKATSTPVSIKQYPMKQEARLGIKPHIQRLLDQGILVPCQSPWNTPLLPVKKPGTNDYRPVQDLREVNKRVEDIHPTVPNPYNLLSGLPPSHQWYTVLDLKDAFFCLRLHPTSQPLFAFEWRDPEMGISGQLTWTRLPQGFKNSPALFNEALRRDLADFRIQHPDLILLQYVDDLLLAATSELDCQQGTRALLQTLGNLGYRASAKKAQICQKQVKYLGYLLKEGQRWLTEARKETVMGQPTPKTPRQLRKFLGTAGNCRLFIPGFAEMAAPLYPLTKPGTLFNWGPDQQKAYQEIKQALLTAPALGLPDLTKPFELFVDEKQGYAKGVLTQKLGPWRRPVAYLSKKLDPVAAGWPPCLRMVAAIAVLTKDAGKLTMGQPLVIGAPHAVEALVKQPPDRWLSKARMTHYQALLLDTDRVQFGPVVALNPATLLPLPEEGLQHNCLDILAEAHGTRPDLTDQPLPDADHTWYTGGSSLLQEGQRKAGAAVTTETEVIWAKALPAGTSAQRAELIALTQALKMAEGKKLNVYTNSRYAFATAHIQGEIYRRRGLLTSEGKEIKNKDEILALLKALFLPKRLSIIHCPGHQKGHSAEARGNRMANQAARKAAITETPDTSTLLIENSSP

SEQ ID NO: 122 - protein, 677 aa, Artificial Sequence
  Synthetic
TLNIEDEYRLHETSKEPDVSLGSTWLSDFPQAWAETGGMGLAVRQAPLIIPLKATSTPVSIKQYPMSQEARLGIKPHIQRLLDQGILVPCQSPWNTPLLPVKKPGTNDYRPVQDLREVNKRVEDIHPTVPNPYNLLSGLPPSHQWYTVLDLKDAFFCLRLHPTSQPLFAFEWRDPEMGISGQLTWTRLPQGFKNSPTLFNEALHRDLADFRIQHPDLILLQYVDDLLLAATSELDCQQGTRALLQTLGNLGYRASAKKAQICQKQVKYLGYLLKEGQRWLTEARKETVMGQPTPKTPRQLREFLGKAGFCRLFIPGFAEMAAPLYPLTKPGTLFNWGPDQQKAYQEIKQALLTAPALGLPDLTKPFELFVDEKQGYAKGVLTQKLGPWRRPVAYLSKKLDPVAAGWPPCLRMVAAIAVLTKDAGKLTMGQPLVILAPHAVEALVKQPPDRWLSNARMTHYQALLLDTDRVQFGPVVALNPATLLPLPEEGLQHNCLDILAEAHGTRPDLTDQPLPDADHTWYTDGSSLLQEGQRKAGAAVTTETEVIWAKALPAGTSAQRAELIALTQALKMAEGKKLNVYTDSRYAFATAHIHGEIYRRRGWLTSEGKEIKNKDEILALLKALFLPKRLSIIHCPGHQKGHSAEARGNRMADQAARKAAITETPDTSTLLIENSSP

SEQ ID NO: 123 - protein, 2117 aa, Artificial Sequence
  Synthetic
MKRTADGSEFESPKKKRKVDKKYSIGLDIGTNSVGWAVITDEYKVPSKKFKVLGNTDRHSIKKNLIGALLFDSGETAEATRLKRTARRRYTRRKNRICYLQEIFSNEMAKVDDSFFHRLEESFLVEEDKKHERHPIFGNIVDEVAYHEKYPTIYHLRKKLVDSTDKADLRLIYLALAHMIKFRGHFLIEGDLNPDNSDVDKLFIQLVQTYNQLFEENPINASGVDAKAILSARLSKSRRLENLIAQLPGEKKNGLFGNLIALSLGLTPNFKSNFDLAEDAKLQLSKDTYDDDLDNLLAQIGDQYADLFLAAKNLSDAILLSDILRVNTEITKAPLSASMIKRYDEHHQDLTLLKALVRQQLPEKYKEIFFDQSKNGYAGYIDGGASQEEFYKFIKPILEKMDGTEELLVKLNREDLLRKQRTFDNGSIPHQIHLGELHAILRRQEDFYPFLKDNREKIEKILTFRIPYYVGPLARGNSRFAWMTRKSEETITPWNFEEVVDKGASAQSFIERMTNFDKNLPNEKVLPKHSLLYEYFTVYNELTKVKYVTEGMRKPAFLSGEQKKAIVDLLFKTNRKVTVKQLKEDYFKKIECFDSVEISGVEDRFNASLGTYHDLLKIIKDKDFLDNEENEDILEDIVLTLTLFEDREMIEERLKTYAHLFDDKVMKQLKRRRYTGWGRLSRKLINGIRDKQSGKTILDFLKSDGFANRNFMQLIHDDSLTFKEDIQKAQVSGQGDSLHEHIANLAGSPAIKKGILQTVKVVDELVKVMGRHKPENIVIEMARENQTTQKGQKNSRERMKRIEEGIKELGSQILKEHPVENTQLQNEKLYLYYLQNGRDMYVDQELDINRLSDYDVDAIVPQSFLKDDSIDNKVLTRSDKNRGKSDNVPSEEVVKKMKNYWRQLLNAKLITQRKFDNLTKAERGGLSELDKAGFIKRQLVETRQITKHVAQILDSRMNTKYDENDKLIREVKVITLKSKLVSDFRKDFQFYKVREINNYHHAHDAYLNAVVGTALIKKYPKLESEFVYGDYKVYDVRKMIAKSEQEIGKATAKYFFYSNIMNFFKTEITLANGEIRKRPLIETNGETGEIVWDKGRDFATVRKVLSMPQVNIVKKTEVQTGGFSKESILPKRNSDKLIARKKDWDPKKYGGFDSPTVAYSVLVVAKVEKGKSKKLKSVKELLGITIMERSSFEKNPIDFLEAKGYKEVKKDLIIKLPKYSLFELENGRKRMLASAGELQKGNELALPSKYVNFLYLASHYEKLKGSPEDNEQKQLFVEQHKHYLDEIIEQISEFSKRVILADANLDKVLSAYNKHRDKPIREQAENIIHLFTLTNLGAPAAFKYFDTTIDRKRYTSTKEVLDATLIHQSITGLYETRIDLSQLGGDSGGSSGGSSGSETPGTSESATPESSGGSSGGSSTLNIEDEYRLHETSKEPDVSLGSTWLSDFPQAWAETGGMGLAVRQAPLIIPLKATSTPVSIKQYPMSQEARLGIKPHIQRLLDQGILVPCQSPWNTPLLPVKKPGTNDYRPVQDLREVNKRVEDIHPTVPNPYNLLSGLPPSHQWYTVLDLKDAFFCLRLHPTSQPLFAFEWRDPEMGISGQLTWTRLPQGFKNSPTLFDEALHRDLADFRIQHPDLILLQYVDDLLLAATSELDCQQGTRALLQTLGNLGYRASAKKAQICQKQVKYLGYLLKEGQRWLTEARKETVMGQPTPKTPRQLREFLGTAGFCRLWIPGFAEMAAPLYPLTKTGTLFNWGPDQQKAYQEIKQALLTAPALGLPDLTKPFELFVDEKQGYAKGVLTQKLGPWRRPVAYLSKKLDPVAAGWPPCLRMVAAIAVLTKDAGKLTMGQPLVILAPHAVEALVKQPPDRWLSNARMTHYQALLLDTDRVQFGPVVALNPATLLPLPEEGLQHNCLDILAEAHGTRPDLTDQPLPDADHTWYTDGSSLLQEGQRKAGAAVTTETEVIWAKALPAGTSAQRAELIALTQALKMAEGKKLNVYTDSRYAFATAHIHGEIYRRRGLLTSEGKEIKNKDEILALLKALFLPKRLSIIHCPGHQKGHSAEARGNRMADQAARKAAITETPDTSTLLIENSSPSGGSKRTADGSEFEPKKKRKV

SEQ ID NO: 124 - protein, 19 aa, Artificial Sequence
  Synthetic
MKRTADGSEFESPKKKRKV

SEQ ID NO: 125 - protein, 17 aa, Artificial Sequence
  Synthetic
KRTADGSEFEPKKKRKV

SEQ ID NO: 126 - protein, 1367 aa, Artificial Sequence; identical to SEQ ID NO: 55
  Synthetic

SEQ ID NO: 127 - protein, 33 aa, Artificial Sequence
  Synthetic
SGGSSGGSSGSETPGTSESATPESSGGSSGGSS

SEQ ID NO: 128 - protein, 677 aa, Artificial Sequence; identical to SEQ ID NO: 89
  Synthetic

SEQ ID NO: 129 - protein, 328 aa, Artificial Sequence
  Synthetic
MGKRHRNLIDQITTWENLLDAYRKTSHGKRRTWGYLEFKEYDLANLLALQAELKAGNYERGPYREFLVYEPKPRLISALEFKDRLVQHALCNIVAPIFEAGLLPYTYACRPDKGTHAGVCHVQAELRRTRATHFLKSDFSKFFPSIDRAALYAMIDKKIHCAATRRLLRVVLPDEGVGIPIGSLTSQLFANVYGGAVDRLLHDELKQRHWARYMDDIVVLGDDPEELRAVFYRLRDFASERLGLKISHWQVAPVSRGINFLGYRIWPTHKLLRKSSVKRAKRKVANFIKHGEDESLQRFLASWSGHAQWADTHNLFTWMEEQYGIACH

SEQ ID NO: 130 - protein, 1367 aa, Artificial Sequence; identical to SEQ ID NO: 55
  Synthetic

SEQ ID NO: 131 - DNA, 76 bp, Artificial Sequence
  Synthetic
gttttagagctagaaatagcaagttaaaataaggctagtccgttatcaacttgaaaaagtggcaccgagtcggtgc

SEQ ID NO: 132 - protein, 677 aa, Artificial Sequence; identical to SEQ ID NO: 89
  Synthetic

SEQ ID NO: 133 - protein, 21 aa, Artificial Sequence
  Synthetic
SGGSKRTADGSEFEPKKKRKV

SEQ ID NO: 134 - protein, 2117 aa, Artificial Sequence
  Synthetic
MKRTADGSEFESPKKKRKVDKKYSIGLDIGTNSVGWAVITDEYKVPSKKFKVLGNTDRHSIKKNLIGALLFDSGETAEATRLKRTARRRYTRRKNRICYLQEIFSNEMAKVDDSFFHRLEESFLVEEDKKHERHPIFGNIVDEVAYHEKYPTIYHLRKKLVDSTDKADLRLIYLALAHMIKFRGHFLIEGDLNPDNSDVDKLFIQLVQTYNQLFEENPINASGVDAKAILSARLSKSRRLENLIAQLPGEKKNGLFGNLIALSLGLTPNFKSNFDLAEDAKLQLSKDTYDDDLDNLLAQIGDQYADLFLAAKNLSDAILLSDILRVNTEITKAPLSASMIKRYDEHHQDLTLLKALVRQQLPEKYKEIFFDQSKNGYAGYIDGGASQEEFYKFIKPILEKMDGTEELLVKLNREDLLRKQRTFDNGSIPHQIHLGELHAILRRQEDFYPFLKDNREKIEKILTFRIPYYVGPLARGNSRFAWMTRKSEETITPWNFEEVVDKGASAQSFIERMTNFDKNLPNEKVLPKHSLLYEYFTVYNELTKVKYVTEGMRKPAFLSGEQKKAIVDLLFKTNRKVTVKQLKEDYFKKIECFDSVEISGVEDRFNASLGTYHDLLKIIKDKDFLDNEENEDILEDIVLTLTLFEDREMIEERLKTYAHLFDDKVMKQLKRRRYTGWGRLSRKLINGIRDKQSGKTILDFLKSDGFANRNFMQLIHDDSLTFKEDIQKAQVSGQGDSLHEHIANLAGSPAIKKGILQTVKVVDELVKVMGRHKPENIVIEMARENQTTQKGQKNSRERMKRIEEGIKELGSQILKEHPVENTQLQNEKLYLYYLQNGRDMYVDQELDINRLSDYDVDAIVPQSFLKDDSIDNKVLTRSDKNRGKSDNVPSEEVVKKMKNYWRQLLNAKLITQRKFDNLTKAERGGLSELDKAGFIKRQLVETRQITKHVAQILDSRMNTKYDENDKLIREVKVITLKSKLVSDFRKDFQFYKVREINNYHHAHDAYLNAVVGTALIKKYPKLESEFVYGDYKVYDVRKMIAKSEQEIGKATAKYFFYSNIMNFFKTEITLANGEIRKRPLIETNGETGEIVWDKGRDFATVRKVLSMPQVNIVKKTEVQTGGFSKESILPKRNSDKLIARKKDWDPKKYGGFDSPTVAYSVLVVAKVEKGKSKKLKSVKELLGITIMERSSFEKNPIDFLEAKGYKEVKKDLIIKLPKYSLFELENGRKRMLASAGELQKGNELALPSKYVNFLYLASHYEKLKGSPEDNEQKQLFVEQHKHYLDEIIEQISEFSKRVILADANLDKVLSAYNKHRDKPIREQAENIIHLFTLTNLGAPAAFKYFDTTIDRKRYTSTKEVLDATLIHQSITGLYETRIDLSQLGGDSGGSSGGSSGSETPGTSESATPESSGGSSGGSSTLNIEDEYRLHETSKEPDVSLGSTWLSDFPQAWAETGGMGLAVRQAPLIIPLKATSTPVSIKQYPMSQEARLGIKPHIQRLLDQGILVPCQSPWNTPLLPVKKPGTNDYRPVQDLREVNKRVEDIHPTVPNPYNLLSGLPPSHQWYTVLDLKDAFFCLRLHPTSQPLFAFEWRDPEMGISGQLTWTRLPQGFKNSPTLFNEALHRDLADFRIQHPDLILLQYVDDLLLAATSELDCQQGTRALLQTLGNLGYRASAKKAQICQKQVKYLGYLLKEGQRWLTEARKETVMGQPTPKTPRQLREFLGKAGFCRLFIPGFAEMAAPLYPLTKPGTLFNWGPDQQKAYQEIKQALLTAPALGLPDLTKPFELFVDEKQGYAKGVLTQKLGPWRRPVAYLSKKLDPVAAGWPPCLRMVAAIAVLTKDAGKLTMGQPLVILAPHAVEALVKQPPDRWLSNARMTHYQALLLDTDRVQFGPVVALNPATLLPLPEEGLQHNCLDILAEAHGTRPDLTDQPLPDADHTWYTDGSSLLQEGQRKAGAAVTTETEVIWAKALPAGTSAQRAELIALTQALKMAEGKKLNVYTDSRYAFATAHIHGEIYRRRGWLTSEGKEIKNKDEILALLKALFLPKRLSIIHCPGHQKGHSAEARGNRMADQAARKAAITETPDTSTLLIENSSPSGGSKRTADGSEFEPKKKRKV

SEQ ID NO: 135-136 - skipped (2 entries)

SEQ ID NO: 137 - protein, 1367 aa, Artificial Sequence; identical to SEQ ID NO: 55
  Synthetic

SEQ ID NO: 138 - skipped

SEQ ID NO: 139 - protein, 677 aa, Artificial Sequence; identical to SEQ ID NO: 122
  Synthetic

SEQ ID NO: 140 - skipped

SEQ ID NO: 141 - protein, 1367 aa, Artificial Sequence; identical to SEQ ID NO: 55
  Synthetic

SEQ ID NO: 142 - skipped

SEQ ID NO: 143 - protein, 677 aa, Artificial Sequence; identical to SEQ ID NO: 122
  Synthetic

SEQ ID NO: 144 - skipped

SEQ ID NO: 145 - protein, 2117 aa, Artificial Sequence
  Synthetic
MKRTADGSEFESPKKKRKVTLNIEDEYRLHETSKEPDVSLGSTWLSDFPQAWAETGGMGLAVRQAPLIIPLKATSTPVSIKQYPMSQEARLGIKPHIQRLLDQGILVPCQSPWNTPLLPVKKPGTNDYRPVQDLREVNKRVEDIHPTVPNPYNLLSGLPPSHQWYTVLDLKDAFFCLRLHPTSQPLFAFEWRDPEMGISGQLTWTRLPQGFKNSPTLFDEALHRDLADFRIQHPDLILLQYVDDLLLAATSELDCQQGTRALLQTLGNLGYRASAKKAQICQKQVKYLGYLLKEGQRWLTEARKETVMGQPTPKTPRQLREFLGTAGFCRLWIPGFAEMAAPLYPLTKTGTLFNWGPDQQKAYQEIKQALLTAPALGLPDLTKPFELFVDEKQGYAKGVLTQKLGPWRRPVAYLSKKLDPVAAGWPPCLRMVAAIAVLTKDAGKLTMGQPLVILAPHAVEALVKQPPDRWLSNARMTHYQALLLDTDRVQFGPVVALNPATLLPLPEEGLQHNCLDILAEAHGTRPDLTDQPLPDADHTWYTDGSSLLQEGQRKAGAAVTTETEVIWAKALPAGTSAQRAELIALTQALKMAEGKKLNVYTDSRYAFATAHIHGEIYRRRGLLTSEGKEIKNKDEILALLKALFLPKRLSIIHCPGHQKGHSAEARGNRMADQAARKAAITETPDTSTLLIENSSPSGGSSGGSSGSETPGTSESATPESSGGSSGGSSDKKYSIGLDIGTNSVGWAVITDEYKVPSKKFKVLGNTDRHSIKKNLIGALLFDSGETAEATRLKRTARRRYTRRKNRICYLQEIFSNEMAKVDDSFFHRLEESFLVEEDKKHERHPIFGNIVDEVAYHEKYPTIYHLRKKLVDSTDKADLRLIYLALAHMIKFRGHFLIEGDLNPDNSDVDKLFIQLVQTYNQLFEENPINASGVDAKAILSARLSKSRRLENLIAQLPGEKKNGLFGNLIALSLGLTPNFKSNFDLAEDAKLQLSKDTYDDDLDNLLAQIGDQYADLFLAAKNLSDAILLSDILRVNTEITKAPLSASMIKRYDEHHQDLTLLKALVRQQLPEKYKEIFFDQSKNGYAGYIDGGASQEEFYKFIKPILEKMDGTEELLVKLNREDLLRKQRTFDNGSIPHQIHLGELHAILRRQEDFYPFLKDNREKIEKILTFRIPYYVGPLARGNSRFAWMTRKSEETITPWNFEEVVDKGASAQSFIERMTNFDKNLPNEKVLPKHSLLYEYFTVYNELTKVKYVTEGMRKPAFLSGEQKKAIVDLLFKTNRKVTVKQLKEDYFKKIECFDSVEISGVEDRFNASLGTYHDLLKIIKDKDFLDNEENEDILEDIVLTLTLFEDREMIEERLKTYAHLFDDKVMKQLKRRRYTGWGRLSRKLINGIRDKQSGKTILDFLKSDGFANRNFMQLIHDDSLTFKEDIQKAQVSGQGDSLHEHIANLAGSPAIKKGILQTVKVVDELVKVMGRHKPENIVIEMARENQTTQKGQKNSRERMKRIEEGIKELGSQILKEHPVENTQLQNEKLYLYYLQNGRDMYVDQELDINRLSDYDVDAIVPQSFLKDDSIDNKVLTRSDKNRGKSDNVPSEEVVKKMKNYWRQLLNAKLITQRKFDNLTKAERGGLSELDKAGFIKRQLVETRQITKHVAQILDSRMNTKYDENDKLIREVKVITLKSKLVSDFRKDFQFYKVREINNYHHAHDAYLNAVVGTALIKKYPKLESEFVYGDYKVYDVRKMIAKSEQEIGKATAKYFFYSNIMNFFKTEITLANGEIRKRPLIETNGETGEIVWDKGRDFATVRKVLSMPQVNIVKKTEVQTGGFSKESILPKRNSDKLIARKKDWDPKKYGGFDSPTVAYSVLVVAKVEKGKSKKLKSVKELLGITIMERSSFEKNPIDFLEAKGYKEVKKDLIIKLPKYSLFELENGRKRMLASAGELQKGNELALPSKYVNFLYLASHYEKLKGSPEDNEQKQLFVEQHKHYLDEIIEQISEFSKRVILADANLDKVLSAYNKHRDKPIREQAENIIHLFTLTNLGAPAAFKYFDTTIDRKRYTSTKEVLDATLIHQSITGLYETRIDLSQLGGDSGGSKRTADGSEFEPKKKRKV

SEQ ID NO: 146 - skipped

SEQ ID NO: 147 - protein, 1367 aa, Artificial Sequence; identical to SEQ ID NO: 55
  Synthetic

SEQ ID NO: 148 - skipped

SEQ ID NO: 149 - protein, 677 aa, Artificial Sequence; identical to SEQ ID NO: 89
  Synthetic

SEQ ID NO: 150 - protein, 2144 aa, Artificial Sequence
  Synthetic
MKRTADGSEFESPKKKRKVTLNIEDEYRLHETSKEPDVSLGSTWLSDFPQAWAETGGMGLAVRQAPLIIPLKATSTPVSIKQYPMSQEARLGIKPHIQRLLDQGILVPCQSPWNTPLLPVKKPGTNDYRPVQDLREVNKRVEDIHPTVPNPYNLLSGLPPSHQWYTVLDLKDAFFCLRLHPTSQPLFAFEWRDPEMGISGQLTWTRLPQGFKNSPTLFDEALHRDLADFRIQHPDLILLQYVDDLLLAATSELDCQQGTRALLQTLGNLGYRASAKKAQICQKQVKYLGYLLKEGQRWLTEARKETVMGQPTPKTPRQLREFLGTAGFCRLWIPGFAEMAAPLYPLTKTGTLFNWGPDQQKAYQEIKQALLTAPALGLPDLTKPFELFVDEKQGYAKGVLTQKLGPWRRPVAYLSKKLDPVAAGWPPCLRMVAAIAVLTKDAGKLTMGQPLVILAPHAVEALVKQPPDRWLSNARMTHYQALLLDTDRVQFGPVVALNPATLLPLPEEGLQHNCLDILAEAHGTRPDLTDQPLPDADHTWYTDGSSLLQEGQRKAGAAVTTETEVIWAKALPAGTSAQRAELIALTQALKMAEGKKLNVYTDSRYAFATAHIHGEIYRRRGLLTSEGKEIKNKDEILALLKALFLPKRLSIIHCPGHQKGHSAEARGNRMADQAARKAAITETPDTSTLLIENSSPSGGSSGGSSGSETPGTSESATPESAGSYPYDVPDYAGSAAPAAKKKKLDGSGSGGSSGGSDKKYSIGLDIGTNSVGWAVITDEYKVPSKKFKVLGNTDRHSIKKNLIGALLFDSGETAEATRLKRTARRRYTRRKNRICYLQEIFSNEMAKVDDSFFHRLEESFLVEEDKKHERHPIFGNIVDEVAYHEKYPTIYHLRKKLVDSTDKADLRLIYLALAHMIKFRGHFLIEGDLNPDNSDVDKLFIQLVQTYNQLFEENPINASGVDAKAILSARLSKSRRLENLIAQLPGEKKNGLFGNLIALSLGLTPNFKSNFDLAEDAKLQLSKDTYDDDLDNLLAQIGDQYADLFLAAKNLSDAILLSDILRVNTEITKAPLSASMIKRYDEHHQDLTLLKALVRQQLPEKYKEIFFDQSKNGYAGYIDGGASQEEFYKFIKPILEKMDGTEELLVKLNREDLLRKQRTFDNGSIPHQIHLGELHAILRRQEDFYPFLKDNREKIEKILTFRIPYYVGPLARGNSRFAWMTRKSEETITPWNFEEVVDKGASAQSFIERMTNFDKNLPNEKVLPKHSLLYEYFTVYNELTKVKYVTEGMRKPAFLSGEQKKAIVDLLFKTNRKVTVKQLKEDYFKKIECFDSVEISGVEDRFNASLGTYHDLLKIIKDKDFLDNEENEDILEDIVLTLTLFEDREMIEERLKTYAHLFDDKVMKQLKRRRYTGWGRLSRKLINGIRDKQSGKTILDFLKSDGFANRNFMQLIHDDSLTFKEDIQKAQVSGQGDSLHEHIANLAGSPAIKKGILQTVKVVDELVKVMGRHKPENIVIEMARENQTTQKGQKNSRERMKRIEEGIKELGSQILKEHPVENTQLQNEKLYLYYLQNGRDMYVDQELDINRLSDYDVDAIVPQSFLKDDSIDNKVLTRSDKNRGKSDNVPSEEVVKKMKNYWRQLLNAKLITQRKFDNLTKAERGGLSELDKAGFIKRQLVETRQITKHVAQILDSRMNTKYDENDKLIREVKVITLKSKLVSDFRKDFQFYKVREINNYHHAHDAYLNAVVGTALIKKYPKLESEFVYGDYKVYDVRKMIAKSEQEIGKATAKYFFYSNIMNFFKTEITLANGEIRKRPLIETNGETGEIVWDKGRDFATVRKVLSMPQVNIVKKTEVQTGGFSKESILPKRNSDKLIARKKDWDPKKYGGFDSPTVAYSVLVVAKVEKGKSKKLKSVKELLGITIMERSSFEKNPIDFLEAKGYKEVKKDLIIKLPKYSLFELENGRKRMLASAGELQKGNELALPSKYVNFLYLASHYEKLKGSPEDNEQKQLFVEQHKHYLDEIIEQISEFSKRVILADANLDKVLSAYNKHRDKPIREQAENIIHLFTLTNLGAPAAFKYFDTTIDRKRYTSTKEVLDATLIHQSITGLYETRIDLSQLGGDSGGSKRTADGSEFEPKKKRKV

SEQ ID NO: 151-152 - skipped (2 entries)

SEQ ID NO: 153 - protein, 1367 aa, Artificial Sequence; identical to SEQ ID NO: 55
  Synthetic

SEQ ID NO: 154 - protein, 2529 aa, Artificial Sequence
  Synthetic
MKRTADGSEFESPKKKRKVDKKYSIGLDIGTNSVGWAVITDEYKVPSKKFKVLGNTDRHSIKKNLIGALLFDSGETAEATRLKRTARRRYTRRKNRICYLQEIFSNEMAKVDDSFFHRLEESFLVEEDKKHERHPIFGNIVDEVAYHEKYPTIYHLRKKLVDSTDKADLRLIYLALAHMIKFRGHFLIEGDLNPDNSDVDKLFIQLVQTYNQLFEENPINASGVDAKAILSARLSKSRRLENLIAQLPGEKKNGLFGNLIALSLGLTPNFKSNFDLAEDAKLQLSKDTYDDDLDNLLAQIGDQYADLFLAAKNLSDAILLSDILRVNTEITKAPLSASMIKRYDEHHQDLTLLKALVRQQLPEKYKEIFFDQSKNGYAGYIDGGASQEEFYKFIKPILEKMDGTEELLVKLNREDLLRKQRTFDNGSIPHQIHLGELHAILRRQEDFYPFLKDNREKIEKILTFRIPYYVGPLARGNSRFAWMTRKSEETITPWNFEEVVDKGASAQSFIERMTNFDKNLPNEKVLPKHSLLYEYFTVYNELTKVKYVTEGMRKPAFLSGEQKKAIVDLLFKTNRKVTVKQLKEDYFKKIECFDSVEISGVEDRFNASLGTYHDLLKIIKDKDFLDNEENEDILEDIVLTLTLFEDREMIEERLKTYAHLFDDKVMKQLKRRRYTGWGRLSRKLINGIRDKQSGKTILDFLKSDGFANRNFMQLIHDDSLTFKEDIQKAQVSGQGDSLHEHIANLAGSPAIKKGILQTVKVVDELVKVMGRHKPENIVIEMARENQTTQKGQKNSRERMKRIEEGIKELGSQILKEHPVENTQLQNEKLYLYYLQNGRDMYVDQELDINRLSDYDVDAIVPQSFLKDDSIDNKVLTRSDKNRGKSDNVPSEEVVKKMKNYWRQLLNAKLITQRKFDNLTKAERGGLSELDKAGFIKRQLVETRQITKHVAQILDSRMNTKYDENDKLIREVKVITLKSKLVSDFRKDFQFYKVREINNYHHAHDAYLNAVVGTALIKKYPKLESEFVYGDYKVYDVRKMIAKSEQEIGKATAKYFFYSNIMNFFKTEITLANGEIRKRPLIETNGETGEIVWDKGRDFATVRKVLSMPQVNIVKKTEVQTGGFSKESILPKRNSDKLIARKKDWDPKKYGGFDSPTVAYSVLVVAKVEKGKSKKLKSVKELLGITIMERSSFEKNPIDFLEAKGYKEVKKDLIIKLPKYSLFELENGRKRMLASAGELQKGNELALPSKYVNFLYLASHYEKLKGSPEDNEQKQLFVEQHKHYLDEIIEQISEFSKRVILADANLDKVLSAYNKHRDKPIREQAENIIHLFTLTNLGAPAAFKYFDTTIDRKRYTSTKEVLDATLIHQSITGLYETRIDLSQLGGDSGGSSGGSSGSETPGTSESATPESSGGSSGGSSGIQGLAKLIADVAPSAIRENDIKSYFGRKVAIDASMSIYQFLIAVRQGGDVLQNEEGETTSHLMGMFYRTIRMMENGIKPVYVFDGKPPQLKSGELAKRSERRAEAEKQLQQAQAAGAEQEVEKFTKRLVKVTKQHNDECKHLLSLMGIPYLDAPSEAEASCAALVKAGKVYAAATEDMDCLTFGSPVLMRHLTASEAKKLPIQEFHLSRILQELGLNQEQFVDLCILLGSDYCESIRGIGPKRAVDLIQKHKSIEEIVRRLDPNKYPVPENWLHKEAHQLFLEPEVLDPESVELKWSEPNEEELIKFMCGEKQFSEERIRSGVKRLSKSRQGSTQGRLDDFFKVTGSLSSAKRKEPEPKGSTKKKAKTGAAGKFKRGKSGGSSGGSSGSETPGTSESATPESSGGSSGGSSTLNIEDEYRLHETSKEPDVSLGSTWLSDFPQAWAETGGMGLAVRQAPLIIPLKATSTPVSIKQYPMSQEARLGIKPHIQRLLDQGILVPCQSPWNTPLLPVKKPGTNDYRPVQDLREVNKRVEDIHPTVPNPYNLLSGLPPSHQWYTVLDLKDAFFCLRLHPTSQPLFAFEWRDPEMGISGQLTWTRLPQGFKNSPTLFNEALHRDLADFRIQHPDLILLQYVDDLLLAATSELDCQQGTRALLQTLGNLGYRASAKKAQICQKQVKYLGYLLKEGQRWLTEARKETVMGQPTPKTPRQLREFLGKAGFCRLFIPGFAEMAAPLYPLTKPGTLFNWGPDQQKAYQEIKQALLTAPALGLPDLTKPFELFVDEKQGYAKGVLTQKLGPWRRPVAYLSKKLDPVAAGWPPCLRMVAAIAVLTKDAGKLTMGQPLVILAPHAVEALVKQPPDRWLSNARMTHYQALLLDTDRVQFGPVVALNPATLLPLPEEGLQHNCLDILAEAHGTRPDLTDQPLPDADHTWYTDGSSLLQEGQRKAGAAVTTETEVIWAKALPAGTSAQRAELIALTQALKMAEGKKLNVYTDSRYAFATAHIHGEIYRRRGWLTSEGKEIKNKDEILALLKALFLPKRLSIIHCPGHQKGHSAEARGNRMADQAARKAAITETPDTSTLLIENSSPSGGSKRTADGSEFEPKKKRKV

SEQ ID NO: 155-156 - skipped (2 entries)

SEQ ID NO: 157 - protein, 1367 aa, Artificial Sequence; identical to SEQ ID NO: 55
  Synthetic

SEQ ID NO: 158 - skipped

SEQ ID NO: 159 - protein, 677 aa, Artificial Sequence; identical to SEQ ID NO: 122
  Synthetic

SEQ ID NO: 160 - skipped

SEQ ID NO: 161 - protein, 379 aa, Artificial Sequence
  Synthetic
GIQGLAKLIADVAPSAIRENDIKSYFGRKVAIDASMSIYQFLIAVRQGGDVLQNEEGETTSHLMGMFYRTIRMMENGIKPVYVFDGKPPQLKSGELAKRSERRAEAEKQLQQAQAAGAEQEVEKFTKRLVKVTKQHNDECKHLLSLMGIPYLDAPSEAEASCAALVKAGKVYAAATEDMDCLTFGSPVLMRHLTASEAKKLPIQEFHLSRILQELGLNQEQFVDLCILLGSDYCESIRGIGPKRAVDLIQKHKSIEEIVRRLDPNKYPVPENWLHKEAHQLFLEPEVLDPESVELKWSEPNEEELIKFMCGEKQFSEERIRSGVKRLSKSRQGSTQGRLDDFFKVTGSLSSAKRKEPEPKGSTKKKAKTGAAGKFKRGK

SEQ ID NO: 162 - protein, 1803 aa, Artificial Sequence
  Synthetic
MKRTADGSEFESPKKKRKVGKRNYILGLDIGITSVGYGIIDYETRDVIDAGVRLFKEANVENNEGRRSKRGARRLKRRRRHRIQRVKKLLFDYNLLTDHSELSGINPYEARVKGLSQKLSEEEFSAALLHLAKRRGVHNVNEVEEDTGNELSTKEQISRNSKALEEKYVAELQLERLKKDGEVRGSINRFKTSDYVKEAKQLLKVQKAYHQLDQSFIDTYIDLLETRRTYYEGPGEGSPFGWKDIKEWYEMLMGHCTYFPEELRSVKYAYNADLYNALNDLNNLVITRDENEKLEYYEKFQIIENVFKQKKKPTLKQIAKEILVNEEDIKGYRVTSTGKPEFTNLKVYHDIKDITARKEIIENAELLDQIAKILTIYQSSEDIQEELTNLNSELTQEEIEQISNLKGYTGTHNLSLKAINLILDELWHTNDNQIAIFNRLKLVPKKVDLSQQKEIPTTLVDDFILSPVVKRSFIQSIKVINAIIKKYGLPNDIIIELAREKNSKDAQKMINEMQKRNRQTNERIEEIIRTTGKENAKYLIEKIKLHDMQEGKCLYSLEAIPLEDLLNNPFNYEVDHIIPRSVSFDNSFNNKVLVKQEEASKKGNRTPFQYLSSSDSKISYETFKKHILNLAKGKGRISKTKKEYLLEERDINRFSVQKDFINRNLVDTRYATRGLMNLLRSYFRVNNLDVKVKSINGGFTSFLRRKWKFKKERNKGYKHHAEDALIIANADFIFKEWKKLDKAKKVMENQMFEEKQAESMPEIETEQEYKEIFITPHQIKHIKDFKDYKYSHRVDKKPNRELINDTLYSTRKDDKGNTLIVNNLNGLYDKDNDKLKKLINKSPEKLLMYHHDPQTYQKLKLIMEQYGDEKNPLYKYYEETGNYLTKYSKKDNGPVIKKIKYYGNKLNAHLDITDDYPNSRNKVVKLSLKPYRFDVYLDNGVYKFVTVKNLDVIKKENYYEVNSKCYEEAKKLKKISNQAEFIASFYNNDLIKINGELYRVIGVNNDLLNRIEVNMIDITYREYLENMNDKRPPRIIKTIASKTQSIKKYSTDILGNLYEVKSKKHPQIIKKGSGGSSGGSSGSETPGTSESATPESSGGSSGGSSTLNIEDEYRLHETSKEPDVSLGSTWLSDFPQAWAETGGMGLAVRQAPLIIPLKATSTPVSIKQYPMSQEARLGIKPHIQRLLDQGILVPCQSPWNTPLLPVKKPGTNDYRPVQDLREVNKRVEDIHPTVPNPYNLLSGLPPSHQWYTVLDLKDAFFCLRLHPTSQPLFAFEWRDPEMGISGQLTWTRLPQGFKNSPTLFDEALHRDLADFRIQHPDLILLQYVDDLLLAATSELDCQQGTRALLQTLGNLGYRASAKKAQICQKQVKYLGYLLKEGQRWLTEARKETVMGQPTPKTPRQLREFLGTAGFCRLWIPGFAEMAAPLYPLTKTGTLFNWGPDQQKAYQEIKQALLTAPALGLPDLTKPFELFVDEKQGYAKGVLTQKLGPWRRPVAYLSKKLDPVAAGWPPCLRMVAAIAVLTKDAGKLTMGQPLVILAPHAVEALVKQPPDRWLSNARMTHYQALLLDTDRVQFGPVVALNPATLLPLPEEGLQHNCLDILAEAHGTRPDLTDQPLPDADHTWYTDGSSLLQEGQRKAGAAVTTETEVIWAKALPAGTSAQRAELIALTQALKMAEGKKLNVYTDSRYAFATAHIHGEIYRRRGLLTSEGKEIKNKDEILALLKALFLPKRLSIIHCPGHQKGHSAEARGNRMADQAARKAAITETPDTSTLLIENSSPSGGSKRTADGSEFEPKKKRKV

SEQ ID NO: 163 - protein, 2117 aa, Artificial Sequence
  Synthetic
MKRTADGSEFESPKKKRKVDKKYSIGLDIGTNSVGWAVITDEYKVPSKKFKVLGNTDRHSIKKNLIGALLFDSGETAEATRLKRTARRRYTRRKNRICYLQEIFSNEMAKVDDSFFHRLEESFLVEEDKKHERHPIFGNIVDEVAYHEKYPTIYHLRKKLVDSTDKADLRLIYLALAHMIKFRGHFLIEGDLNPDNSDVDKLFIQLVQTYNQLFEENPINASGVDAKAILSARLSKSRRLENLIAQLPGEKKNGLFGNLIALSLGLTPNFKSNFDLAEDAKLQLSKDTYDDDLDNLLAQIGDQYADLFLAAKNLSDAILLSDILRVNTEITKAPLSASMIKRYDEHHQDLTLLKALVRQQLPEKYKEIFFDQSKNGYAGYIDGGASQEEFYKFIKPILEKMDGTEELLVKLNREDLLRKQRTFDNGSIPHQIHLGELHAILRRQEDFYPFLKDNREKIEKILTFRIPYYVGPLARGNSRFAWMTRKSEETITPWNFEEVVDKGASAQSFIERMTNFDKNLPNEKVLPKHSLLYEYFTVYNELTKVKYVTEGMRKPAFLSGEQKKAIVDLLFKTNRKVTVKQLKEDYFKKIECFDSVEISGVEDRFNASLGTYHDLLKIIKDKDFLDNEENEDILEDIVLTLTLFEDREMIEERLKTYAHLFDDKVMKQLKRRRYTGWGRLSRKLINGIRDKQSGKTILDFLKSDGFANRNFMQLIHDDSLTFKEDIQKAQVSGQGDSLHEHIANLAGSPAIKKGILQTVKVVDELVKVMGRHKPENIVIEMARENQTTQKGQKNSRERMKRIEEGIKELGSQILKEHPVENTQLQNEKLYLYYLQNGRDMYVDQELDINRLSDYDVDAIVPQSFLKDDSIDNKVLTRSDKNRGKSDNVPSEEVVKKMKNYWRQLLNAKLITQRKFDNLTKAERGGLSELDKAGFIKRQLVETRQITKHVAQILDSRMNTKYDENDKLIREVKVITLKSKLVSDFRKDFQFYKVREINNYHHAHDAYLNAVVGTALIKKYPKLESEFVYGDYKVYDVRKMIAKSEQEIGKATAKYFFYSNIMNFFKTEITLANGEIRKRPLIETNGETGEIVWDKGRDFATVRKVLSMPQVNIVKKTEVQTGGFSKESILPKRNSDKLIARKKDWDPKKYGGFVSPTVAYSVLVVAKVEKGKSKKLKSVKELLGITIMERSSFEKNPIDFLEAKGYKEVKKDLIIKLPKYSLFELENGRKRMLASARELQKGNELALPSKYVNFLYLASHYEKLKGSPEDNEQKQLFVEQHKHYLDEIIEQISEFSKRVILADANLDKVLSAYNKHRDKPIREQAENIIHLFTLTNLGAPAAFKYFDTTIDRKQYRSTKEVLDATLIHQSITGLYETRIDLSQLGGDSGGSSGGSSGSETPGTSESATPESSGGSSGGSSTLNIEDEYRLHETSKEPDVSLGSTWLSDFPQAWAETGGMGLAVRQAPLIIPLKATSTPVSIKQYPMSQEARLGIKPHIQRLLDQGILVPCQSPWNTPLLPVKKPGTNDYRPVQDLREVNKRVEDIHPTVPNPYNLLSGLPPSHQWYTVLDLKDAFFCLRLHPTSQPLFAFEWRDPEMGISGQLTWTRLPQGFKNSPTLFNEALHRDLADFRIQHPDLILLQYVDDLLLAATSELDCQQGTRALLQTLGNLGYRASAKKAQICQKQVKYLGYLLKEGQRWLTEARKETVMGQPTPKTPRQLREFLGKAGFCRLFIPGFAEMAAPLYPLTKPGTLFNWGPDQQKAYQEIKQALLTAPALGLPDLTKPFELFVDEKQGYAKGVLTQKLGPWRRPVAYLSKKLDPVAAGWPPCLRMVAAIAVLTKDAGKLTMGQPLVILAPHAVEALVKQPPDRWLSNARMTHYQALLLDTDRVQFGPVVALNPATLLPLPEEGLQHNCLDILAEAHGTRPDLTDQPLPDADHTWYTDGSSLLQEGQRKAGAAVTTETEVIWAKALPAGTSAQRAELIALTQALKMAEGKKLNVYTDSRYAFATAHIHGEIYRRRGWLTSEGKEIKNKDEILALLKALFLPKRLSIIHCPGHQKGHSAEARGNRMADQAARKAAITETPDTSTLLIENSSPSGGSKRTADGSEFEPKKKRKV

SEQ ID NO: 164 - protein, 2117 aa, Unknown
  MURINE LEUKEMIA VIRUS
MKRTADGSEFESPKKKRKVDKKYSIGLDIGTNSVGWAVITDEYKVPSKKFKVLGNTDRHSIKKNLIGALLFDSGETAEATRLKRTARRRYTRRKNRICYLQEIFSNEMAKVDDSFFHRLEESFLVEEDKKHERHPIFGNIVDEVAYHEKYPTIYHLRKKLVDSTDKADLRLIYLALAHMIKFRGHFLIEGDLNPDNSDVDKLFIQLVQTYNQLFEENPINASGVDAKAILSARLSKSRRLENLIAQLPGEKKNGLFGNLIALSLGLTPNFKSNFDLAEDAKLQLSKDTYDDDLDNLLAQIGDQYADLFLAAKNLSDAILLSDILRVNTEITKAPLSASMIKRYDEHHQDLTLLKALVRQQLPEKYKEIFFDQSKNGYAGYIDGGASQEEFYKFIKPILEKMDGTEELLVKLNREDLLRKQRTFDNGSIPHQIHLGELHAILRRQEDFYPFLKDNREKIEKILTFRIPYYVGPLARGNSRFAWMTRKSEETITPWNFEEVVDKGASAQSFIERMTNFDKNLPNEKVLPKHSLLYEYFTVYNELTKVKYVTEGMRKPAFLSGEQKKAIVDLLFKTNRKVTVKQLKEDYFKKIECFDSVEISGVEDRFNASLGTYHDLLKIIKDKDFLDNEENEDILEDIVLTLTLFEDREMIEERLKTYAHLFDDKVMKQLKRRRYTGWGRLSRKLINGIRDKQSGKTILDFLKSDGFANRNFMQLIHDDSLTFKEDIQKAQVSGQGDSLHEHIANLAGSPAIKKGILQTVKVVDELVKVMGRHKPENIVIEMARENQTTQKGQKNSRERMKRIEEGIKELGSQILKEHPVENTQLQNEKLYLYYLQNGRDMYVDQELDINRLSDYDVDAIVPQSFLKDDSIDNKVLTRSDKNRGKSDNVPSEEVVKKMKNYWRQLLNAKLITQRKFDNLTKAERGGLSELDKAGFIKRQLVETRQITKHVAQILDSRMNTKYDENDKLIREVKVITLKSKLVSDFRKDFQFYKVREINNYHHAHDAYLNAVVGTALIKKYPKLESEFVYGDYKVYDVRKMIAKSEQEIGKATAKYFFYSNIMNFFKTEITLANGEIRKRPLIETNGETGEIVWDKGRDFATVRKVLSMPQVNIVKKTEVQTGGFSKESILPKRNSDKLIARKKDWDPKKYGGFVSPTVAYSVLVVAKVEKGKSKKLKSVKELLGITIMERSSFEKNPIDFLEAKGYKEVKKDLIIKLPKYSLFELENGRKRMLASARELQKGNELALPSKYVNFLYLASHYEKLKGSPEDNEQKQLFVEQHKHYLDEIIEQISEFSKRVILADANLDKVLSAYNKHRDKPIREQAENIIHLFTLTNLGAPAAFKYFDTTIDRKEYRSTKEVLDATLIHQSITGLYETRIDLSQLGGDSGGSSGGSSGSETPGTSESATPESSGGSSGGSSTLNIEDEYRLHETSKEPDVSLGSTWLSDFPQAWAETGGMGLAVRQAPLIIPLKATSTPVSIKQYPMSQEARLGIKPHIQRLLDQGILVPCQSPWNTPLLPVKKPGTNDYRPVQDLREVNKRVEDIHPTVPNPYNLLSGLPPSHQWYTVLDLKDAFFCLRLHPTSQPLFAFEWRDPEMGISGQLTWTRLPQGFKNSPTLFNEALHRDLADFRIQHPDLILLQYVDDLLLAATSELDCQQGTRALLQTLGNLGYRASAKKAQICQKQVKYLGYLLKEGQRWLTEARKETVMGQPTPKTPRQLREFLGKAGFCRLFIPGFAEMAAPLYPLTKPGTLFNWGPDQQKAYQEIKQALLTAPALGLPDLTKPFELFVDEKQGYAKGVLTQKLGPWRRPVAYLSKKLDPVAAGWPPCLRMVAAIAVLTKDAGKLTMGQPLVILAPHAVEALVKQPPDRWLSNARMTHYQALLLDTDRVQFGPVVALNPATLLPLPEEGLQHNCLDILAEAHGTRPDLTDQPLPDADHTWYTDGSSLLQEGQRKAGAAVTTETEVIWAKALPAGTSAQRAELIALTQALKMAEGKKLNVYTDSRYAFATAHIHGEIYRRRGWLTSEGKEIKNKDEILALLKALFLPKRLSIIHCPGHQKGHSAEARGNRMADQAARKAAITETPDTSTLLIENSSPSGGSKRTADGSEFEPKKKRKV

SEQ ID NO: 165 - protein, 150 aa, Artificial Sequence
  Synthetic
  SITE (6)..(150): may be absent
GGGGSGGGGSGGGGSGGGGSGGGGSGGGGSGGGGSGGGGSGGGGSGGGGSGGGGSGGGGSGGGGSGGGGSGGGGSGGGGSGGGGSGGGGSGGGGSGGGGSGGGGSGGGGSGGGGSGGGGSGGGGSGGGGSGGGGSGGGGSGGGGSGGGGS

SEQ ID NO: 166 - protein, 31 aa, Artificial Sequence
  Synthetic
  SITE (2)..(31): may be absent
GGGGGGGGGGGGGGGGGGGGGGGGGGGGGGG

SEQ ID NO: 167 - protein, 150 aa, Artificial Sequence
  Synthetic
  SITE (6)..(150): may be absent
EAAAKEAAAKEAAAKEAAAKEAAAKEAAAKEAAAKEAAAKEAAAKEAAAKEAAAKEAAAKEAAAKEAAAKEAAAKEAAAKEAAAKEAAAKEAAAKEAAAKEAAAKEAAAKEAAAKEAAAKEAAAKEAAAKEAAAKEAAAKEAAAKEAAAK

SEQ ID NO: 168 - protein, 90 aa, Artificial Sequence
  Synthetic
  SITE (4)..(90): may be absent
GGSGGSGGSGGSGGSGGSGGSGGSGGSGGSGGSGGSGGSGGSGGSGGSGGSGGSGGSGGSGGSGGSGGSGGSGGSGGSGGSGGSGGSGGS

SEQ ID NO: 169 - protein, 120 aa, Artificial Sequence
  Synthetic
  SITE (5)..(120): may be absent
SGGSSGGSSGGSSGGSSGGSSGGSSGGSSGGSSGGSSGGSSGGSSGGSSGGSSGGSSGGSSGGSSGGSSGGSSGGSSGGSSGGSSGGSSGGSSGGSSGGSSGGSSGGSSGGSSGGSSGGS

SEQ ID NO: 170 - protein, 60 aa, Artificial Sequence
  Synthetic
  SITE (1)..(1): Xaa can be any naturally occurring amino acid
  SITE (3)..(60): may be absent
XPXPXPXPXPXPXPXPXPXPXPXPXPXPXPXPXPXPXPXPXPXPXPXPXPXPXPXPXPXP

SEQ ID NO: 171 - protein, 16 aa, Artificial Sequence
  Synthetic
SGSETPGTSESATPES

SEQ ID NO: 172 - protein, 32 aa, Artificial Sequence
  Synthetic
SGGSSGGSSGSETPGTSESATPESSGGSSGGS

SEQ ID NO: 173 - protein, 10 aa, Artificial Sequence
  Synthetic
SGGSGGSGGS

SEQ ID NO: 174 - protein, 4 aa, Artificial Sequence
  Synthetic
SGGS

SEQ ID NO: 175 - protein, 60 aa, Artificial Sequence
  Synthetic
SGGSSGGSSGSETPGTSESATPESAGSYPYDVPDYAGSAAPAAKKKKLDGSGSGGSSGGS

SEQ ID NO: 176 - protein, 21 aa, Artificial Sequence
  Synthetic
  SITE (4)..(21): may be absent
GGSGGSGGSGGSGGSGGSGGS

SEQ ID NO: 177 - DNA, 17 bp, Artificial Sequence
  Synthetic
cggtggaccgatgatct

SEQ ID NO: 178 - DNA, 17 bp, Artificial Sequence
  Synthetic
gccacctggctactaga

SEQ ID NO: 179 - DNA, 17 bp, Artificial Sequence
  Synthetic
agatcatcggtccaccg

SEQ ID NO: 180 - DNA, 17 bp, Artificial Sequence
  Synthetic
tctagtagccaggtggc

SEQ ID NO: 181 - DNA, 136 bp, Artificial Sequence
  Synthetic
ggcccagactgagcacgtgagttttagagctagaaatagcaagttaaaataaggctagtccgttatcaacttgaaaaagtggcaccgagtcggtgctctgccatcacggtggaccgatgatctcgtgctcagtctg

SEQ ID NO: 182 - DNA, 154 bp, Artificial Sequence
  Synthetic
ggcactgcggctggaggtgggttttagagctagaaatagcaagttaaaataaggctagtccgttatcaacttgaaaaagtggcaccgagtcggtgcacacagcaccagagtctccgctttaacccccagccacctggctactagacctccagcc

SEQ ID NO: 183 - DNA, 141 bp, Artificial Sequence
  Synthetic
gcatggtgcacctgactcctggttttagagctagaaatagcaagttaaaataaggctagtccgttatcaacttgaaaaagtggcaccgagtcggtgcagacttctcttcaggccacctggctactagagagtcaggtgcac

SEQ ID NO: 184-189 - skipped (6 entries)

SEQ ID NO: 190 - protein, 20 aa, Artificial Sequence
  Synthetic
AVKRPAATKKAGQAKKKKLD

SEQ ID NO: 191 - protein, 25 aa, Artificial Sequence
  Synthetic
MSRRRKANPTKLSENAKKLAKEVEN

SEQ ID NO: 192 - protein, 9 aa, Artificial Sequence
  Synthetic
PAAKRVKLD

SEQ ID NO: 193 - protein, 9 aa, Artificial Sequence
  Synthetic
KLKIKRPVK

SEQ ID NO: 194 - protein, 8 aa, Artificial Sequence
  Synthetic
VSRKRPRP

SEQ ID NO: 195 - protein, 10 aa, Artificial Sequence
  Synthetic
EGAPPAKRAR

SEQ ID NO: 196 - protein, 12 aa, Artificial Sequence
  Synthetic
PPQPKKKPLDGE

SEQ ID NO: 197 - skipped

SEQ ID NO: 198 - protein, 380 aa, Homo sapiens; identical to SEQ ID NO: 7

SEQ ID NO: 199 - protein, 380 aa, Artificial Sequence
  Synthetic
MGIQGLAKLIADVAPSAIRENDIKSYFGRKVAIDASMSIYQFLIAVRQGGDVLQNEEGETTSHLMGMFYRTIRMMENGIKPVYVFDGKPPQLKSGELAKRSERRAEAEKQLQQAQAAGAEQEVEKFTKRLVKVTKQHNDECKHLLSLMGIPYLDAPSEAEASCAALVRAGKVYAAATEDMDCLTFGSPVLMRHLTASEAKKLPIQEFHLSRILQELGLNQEQFVDLCILLGSDYCESIRGIGPKRAVDLIQKHKSIEEIVRRLDPNKYPVPENWLHKEAHQLFLEPEVLDPESVELKWSEPNEEELIKFMCGEKQFSEERIRSGVKRLSKSRQGSTQGRLDDFFKVTGSLSSAKRKEPEPKGSTKKKAKTGAAGKFKRGK

SEQ ID NO: 200 - protein, 380 aa, Artificial Sequence
  Synthetic
MGIQGLAKLIADVAPSAIRENDIKSYFGRKVAIDASMSIYQFLIAVRQGGDVLQNEEGETTSHLMGMFYRTIRMMENGIKPVYVFDGKPPQLKSGELAKRSERRAEAEKQLQQAQAAGAEQEVEKFTKRLVKVTKQHNDECKHLLSLMGIPYLDAPSEAEASCAALVKAGKVYAAATEDMDCLTFGAPVLMRHLTASEAKKLPIQEFHLSRILQELGLNQEQFVDLCILLGSDYCESIRGIGPKRAVDLIQKHKSIEEIVRRLDPNKYPVPENWLHKEAHQLFLEPEVLDPESVELKWSEPNEEELIKFMCGEKQFSEERIRSGVKRLSKSRQGSTQGRLDDFFKVTGSLSSAKRKEPEPKGSTKKKAKTGAAGKFKRGK

SEQ ID NO: 201 - protein, 380 aa, Artificial Sequence
  Synthetic
MGIQGLAKLIADVAPSAIRENDIKSYFGRKVAIDASMSIYQFLIAVRQGGDVLQNEEGETTSHLMGMFYRTIRMMENGIKPVYVFDGKPPQLKSGELAKRSERRAEAEKQLQQAQAAGAEQEVEKFTKRLVKVTKQHNDECKHLLSLMGIPYLDAPSEAEASCAALVKAGKVYAAATEDMDCLTFGSPVLMRHLTASEAKKLPIQEFHLSRILQELGLNQEQFVDLCILLGSDYCESIRGIGPKRAVDLIQKHKSIEEIVRRLDPNKYPVPENWLHKEAHQLFLEPEVLDPESVELKWSEPNEEELIKFMCGEKQFSEERIRSGVKRLSKSRQGSTQGRLDDFFKVTGSLSSARRKEPEPKGSTKKKAKTGAAGKFKRGK

SEQ ID NO: 202 - protein, 908 aa, Artificial Sequence
  Synthetic
MGVNDLWQILEPVKQHIPLRNLGGKTIAVDLSLWVCEAQTVKKMMGSVMKPHLRNLFFRISYLTQMDVKLVFVMEGEPPKLKADVISKRNQSRYGSSGKSWSQKTGRSHFKSVLRECLHMLECLGIPWVQAAGEAEAMCAYLNAGGHVDGCLTNDGDTFLYGAQTVYRNFTMNTKDPHVDCYTMSSIKSKLGLDRDALVGLAILLGCDYLPKGVPGVGKEQALKLIQILKGQSLLQRFNRWNETSCNSSPQLLVTKKLAHCSVCSHPGSPKDHERNGCRLCKSDKYCEPHDYEYCCPCEWHRTEHDRQLSEVENNIKKKACCCEGFPFHEVIQEFLLNKDKLVKVIRYQRPDLLLFQRFTLEKMEWPNHYACEKLLVLLTHYDMIERKLGSRNSNQLQPIRIVKTRIRNGVHCFEIEWEKPEHYAMEDKQHGEFALLTIEEESLFEAAYPEIVAVYQKQKLEIKGKKQKRIKPKENNLPEPDEVMSFQSHMTLKPTCEIFHKQNSKLNSGISPDPTLPQESISASLNSLLLPKNTPCLNAQEQFMSSLRPLAIQQIKAVSKSLISESSQPNTSSHNISVIADLHLSTIDWEGTSFSNSPAIQRNTFSHDLKSEVESELSAIPDGFENIPEQLSCESERYTANIKKVLDEDSDGISPEEHLLSGITDLCLQDLPLKERIFTKLSYPQDNLQPDVNLKTLSILSVKESCIANSGSDCTSHLSKDLPGIPLQNESRDSKILKGDQLLQEDYKVNTSVPYSVSNTVVKTCNVRPPNTALDHSRKVDMQTTRKILMKKSVCLDRHSSDEQSAPVFGKAKYTTQRMKHSSQKHNSSHFKESGHNKLSSPKIHIKETEQCVRSYETAENEESCFPDSTKSSLSSLQCHKKENNSGTCLDSPLPLRQRLKLRFQST

SEQ ID NO: 203 - protein, 1186 aa, Artificial Sequence
  Synthetic
MGVQGLWKLLECSGRQVSPEALEGKILAVDISIWLNQALKGVRDRHGNSIENPHLLTLFHRLCKLLFFRIRPIFVFDGDAPLLKKQTLVKRRQRKDLASSDSRKTTEKLLKTFLKRQAIKTAFRSKRDEALPSLTQVRRENDLYVLPPLQEEEKHSSEEEDEKEWQERMNQKQALQEEFFHNPQAIDIESEDFSSLPPEVKHEILTDMKEFTKRRRTLFEAMPEESDDFSQYQLKGLLKKNYLNQHIEHVQKEMNQQHSGHIRRQYEDEGGFLKEVESRRVVSEDTSHYILIKGIQAKTVAEVDSESLPSSSKMHGMSFDVKSSPCEKLKTEKEPDATPPSPRTLLAMQAALLGSSSEEELESENRRQARGRNAPAAVDEGSISPRTLSAIKRALDDDEDVKVCAGDDVQTGGPGAEEMRINSSTENSDEGLKVRDGKGIPFTATLASSSVNSAEEHVASTNEGREPTDSVPKEQMSLVHVGTEAFPISDESMIKDRKDRLPLESAVVRHSDAPGLPNGRELTPASPTCTNSVSKNETHAEVLEQQNELCPYESKFDSSLLSSDDETKCKPNSASEVIGPVSLQETSSIVSVPSEAVDNVENVVSFNAKEHENFLETIQEQQTTESAGQDLISIPKAVEPMEIDSEESESDGSFIEVQSVISDEELQAEFPETSKPPSEQGEEELVGTREGEAPAESESLLRDNSERDDVDGEPQEAEKDAEDSLHEWQDINLEELETLESNLLAQQNSLKAQKQQQERIAATVTGQMFLESQELLRLFGIPYIQAPMEAEAQCAILDLTDQTSGTITDDSDIWLFGARHVYRNFFNKNKFVEYYQYVDFHNQLGLDRNKLINLAYLLGSDYTEGIPTVGCVTAMEILNEFPGHGLEPLLKFSEWWHEAQKNPKIRPNPHDTKVKKKLRTLQLTPGFPNPAVAEAYLKPVVDDSKGSFLWGKPDLDKIREFCQRYFGWNRTKTDESLFPVLKQLDAQQTQLRIDSFFRLAQQEKEDAKRIKSQRLNRAVTCMLRKEKEAAASEIEAVSVAMEKEFELLDKAKRKTQKRGITNTLEESSSLKRKRLSDSKRKNTCGGFLGETCLSESSDGSSSEDAESSSLMNVQRRTAAKEPKTSASDSQNSVKEAPVKNGGATTSSSSDSDDDGGKEKMVLVTARSVFGKKRRKLRRARGRKRKT

SEQ ID NO: 204 - protein, 23 aa, Artificial Sequence
  Synthetic
  SITE (21)..(21): Xaa can be any naturally occurring amino acid
MMMMMMMMNNNNNNNNNNNNXGG

SEQ ID NO: 205 - protein, 15 aa, Artificial Sequence
  Synthetic
  SITE (13)..(13): Xaa can be any naturally occurring amino acid
NNNNNNNNNNNNXGG

SEQ ID NO: 206 - protein, 23 aa, Artificial Sequence
  Synthetic
  SITE (21)..(21): Xaa can be any naturally occurring amino acid
MMMMMMMMMNNNNNNNNNNNXGG

SEQ ID NO: 207 - protein, 14 aa, Artificial Sequence
  Synthetic
  SITE (12)..(12): Xaa can be any naturally occurring amino acid
NNNNNNNNNNNXGG

SEQ ID NO: 208 - protein, 27 aa, Artificial Sequence
  Synthetic
  SITE (21)..(22): Xaa can be any naturally occurring amino acid
MMMMMMMMNNNNNNNNNNNNXXAGAAW

SEQ ID NO: 209 - protein, 19 aa, Artificial Sequence
  Synthetic
  SITE (13)..(14): Xaa can be any naturally occurring amino acid
NNNNNNNNNNNNXXAGAAW

SEQ ID NO: 210 - protein, 27 aa, Artificial Sequence
  Synthetic
  SITE (21)..(22): Xaa can be any naturally occurring amino acid
MMMMMMMMMNNNNNNNNNNNXXAGAAW

SEQ ID NO: 211 - protein, 18 aa, Artificial Sequence
  Synthetic
  SITE (12)..(13): Xaa can be any naturally occurring amino acid
NNNNNNNNNNNXXAGAAW

SEQ ID NO: 212 - protein, 25 aa, Artificial Sequence
  Synthetic
  SITE (21)..(21): Xaa can be any naturally occurring amino acid
  SITE (24)..(24): Xaa can be any naturally occurring amino acid
MMMMMMMMNNNNNNNNNNNNXGGXG

SEQ ID NO: 213 - protein, 17 aa, Artificial Sequence
  Synthetic
  SITE (13)..(13): Xaa can be any naturally occurring amino acid
  SITE (16)..(16): Xaa can be any naturally occurring amino acid
NNNNNNNNNNNNXGGXG

SEQ ID NO: 214 - protein, 25 aa, Artificial Sequence
  Synthetic
  SITE (21)..(21): Xaa can be any naturally occurring amino acid
  SITE (24)..(24): Xaa can be any naturally occurring amino acid
MMMMMMMMMNNNNNNNNNNNXGGXG

SEQ ID NO: 215 - protein, 16 aa, Artificial Sequence
  Synthetic
  SITE (12)..(12): Xaa can be any naturally occurring amino acid
  SITE (15)..(15): Xaa can be any naturally occurring amino acid
NNNNNNNNNNNXGGXG

SEQ ID NO: 216 - DNA, 125 bp, Artificial Sequence
  Synthetic
  misc_feature (1)..(8): n is a, c, g, or t
nnnnnnnngtttttgtactctcaagatttagaaataaatcttgcagaagctacaaagataaggcttcatgccgaaatcaacaccctgtcattttatggcagggtgttttcgttatttaatttttt

SEQ ID NO: 217 - DNA, 121 bp, Artificial Sequence
  Synthetic
  misc_feature (1)..(18): n is a, c, g, or t
nnnnnnnnnnnnnnnnnngtttttgtactctcagaaatgcagaagctacaaagataaggcttcatgccgaaatcaacaccctgtcattttatggcagggtgttttcgttatttaatttttt

SEQ ID NO: 218 - DNA, 109 bp, Artificial Sequence
  Synthetic
  misc_feature (1)..(20): n is a, c, g, or t
nnnnnnnnnnnnnnnnnnnngtttttgtactctcagaaatgcagaagctacaaagataaggcttcatgccgaaatcaacaccctgtcattttatggcagggtgtttttt

SEQ ID NO: 219 - DNA, 102 bp, Artificial Sequence
  Synthetic
  misc_feature (1)..(20): n is a, c, g, or t
nnnnnnnnnnnnnnnnnnnngttttagagctagaaatagcaagttaaaataaggctagtccgttatcaacttgaaaaagtggcaccgagtcggtgctttttt

SEQ ID NO: 220 - DNA, 88 bp, Artificial Sequence
  Synthetic
  misc_feature (1)..(20): n is a, c, g, or t
nnnnnnnnnnnnnnnnnnnngttttagagctagaaatagcaagttaaaataaggctagtccgttatcaacttgaaaaagtgttttttt

SEQ ID NO: 221 - DNA, 76 bp, Artificial Sequence
  Synthetic
  misc_feature (1)..(20): n is a, c, g, or t
nnnnnnnnnnnnnnnnnnnngttttagagctagaaatagcaagttaaaataaggctagtccgttatcatttttttt

SEQ ID NO: 222 - RNA, 82 nt, Artificial Sequence
  Synthetic
guuuuagagcuagaaauagcaaguuaaaauaaaggcuaguccguuaucaacuugaaaaaguggcaccgagucggugcuuuuu

SEQ ID NO: 223 - DNA, 905 bp, Artificial Sequence
  Synthetic
tagttattaatagtaatcaattacggggtcattagttcatagcccatatatggagttccgcgttacataacttacggtaaatggcccgcctggctgaccgcccaacgacccccgcccattgacgtcaataatgacgtatgttcccatagtaacgccaatagggactttccattgacgtcaatgggtggagtatttacggtaaactgcccacttggcagtacatcaagtgtatcatatgccaagtacgccccctattgacgtcaatgacggtaaatggcccgcctggcattatgcccagtacatgaccttatgggactttcctacttggcagtacatctacgtattagtcatcgctattaccatggtgatgcggttttggcagtacatcaatgggcgtggatagcggtttgactcacggggatttccaagtctccaccccattgacgtcaatgggagtttgttttggcaccaaaatcaacgggactttccaaaatgtcgtaacaactccgccccattgacgcaaatgggcggtaggcgtgtacggtgggaggtctatataagcagagctggtttagtgaaccgtcagatcgttcactgccgtataggcagggcccagactgagcacgtgagttttagagctagaaatagcaagttaaaataaggctagtccgttatcaacttgaaaaagtgggaccgagtcggtcctctgccatcaaagcgtgctcagtctgttttagggtcatgaaggtttttcttttcctgagaaaacaacacgtattgttttctcaggttttgctttttggcctttttctagcttaaaaaaaaaaaaagcaaaagatgctggtggttggcactcctggtttccaggacggggttcaaatccctgcggcgtctttgctttgact

SEQ ID NO: 224 - DNA, 942 bp, Artificial Sequence
  Synthetic
tagttattaatagtaatcaattacggggtcattagttcatagcccatatatggagttccgcgttacataacttacggtaaatggcccgcctggctgaccgcccaacgacccccgcccattgacgtcaataatgacgtatgttcccatagtaacgccaatagggactttccattgacgtcaatgggtggagtatttacggtaaactgcccacttggcagtacatcaagtgtatcatatgccaagtacgccccctattgacgtcaatgacggtaaatggcccgcctggcattatgcccagtacatgaccttatgggactttcctacttggcagtacatctacgtattagtcatcgctattaccatggtgatgcggttttggcagtacatcaatgggcgtggatagcggtttgactcacggggatttccaagtctccaccccattgacgtcaatgggagtttgttttggcaccaaaatcaacgggactttccaaaatgtcgtaacaactccgccccattgacgcaaatgggcggtaggcgtgtacggtgggaggtctatataagcagagctggtttagtgaaccgtcagatcgttcactgccgtataggcagggcccagactgagcacgtgagttttagagctagaaatagcaagttaaaataaggctagtccgttatcaacttgaaaaagtgggaccgagtcggtcctctgccatcaaagcgtgctcagtctgttttgttttggctgggtttttccttgttcgcaccggacacctccagtgaccagacggcaaggtttttatcccagtgtatattggaaaaacatgttatacttttgacaatttaacgtgcctagagctcaaattaaactaataccataacgtaatgcaacttacaacataaataaaggtcaatgtttaatccataaaaaaaaaaaaaaaaaaa

SEQ ID NO: 225 - DNA, 1370 bp, Artificial Sequence
  Synthetic
tagttattaatagtaatcaattacggggtcattagttcatagcccatatatggagttccgcgttacataacttacggtaaatggcccgcctggctgaccgcccaacgacccccgcccattgacgtcaataatgacgtatgttcccatagtaacgccaatagggactttccattgacgtcaatgggtggagtatttacggtaaactgcccacttggcagtacatcaagtgtatcatatgccaagtacgccccctattgacgtcaatgacggtaaatggcccgcctggcattatgcccagtacatgaccttatgggactttcctacttggcagtacatctacgtattagtcatcgctattaccatggtgatgcggttttggcagtacatcaatgggcgtggatagcggtttgactcacggggatttccaagtctccaccccattgacgtcaatgggagtttgttttggcaccaaaatcaacgggactttccaaaatgtcgtaacaactccgccccattgacgcaaatgggcggtaggcgtgtacggtgggaggtctatataagcagagctggtttagtgaaccgtcagatcgttcactgccgtataggcagggcccagactgagcacgtgagttttagagctagaaatagcaagttaaaataaggctagtccgttatcaacttgaaaaagtgggaccgagtcggtcctctgccatcaaagcgtgctcagtctgttttgttttggctgggtttttccttgttcgcaccggacacctccagtgaccagacggcaaggtttttatcccagtgtatattggaaaaacatgttatacttttgacaatttaacgtgcctagagctcaaattaaactaataccataacgtaatgcaacttacaacataaataaaggtcaatgtttaatccataaaaaaaaaaaaaaaaaaaacacactgttttggctgggtttttccttgttcgcaccggacacctccagtgaccagacggcaaggtttttatcccagtgtatattggaaaaacatgttatacttttgacaatttaacgtgcctagagctcaaattaaactaataccataacgtaatgcaacttacaacataaataaaggtcaatgtttaatccataaaaaaaaaaaaaaaaaaatctctctgttttggctgggtttttccttgttcgcaccggacacctccagtgaccagacggcaaggtttttatcccagtgtatattggaaaaacatgttatacttttgacaatttaacgtgcctagagctcaaattaaactaataccataacgtaatgcaacttacaacataaataaaggtcaatgtttaatccataaaaaaaaaaaaaaaaaaa

SEQ ID NO: 226 - DNA, 807 bp, Artificial Sequence
  Synthetic
tagttattaatagtaatcaattacggggtcattagttcatagcccatatatggagttccgcgttacataacttacggtaaatggcccgcctggctgaccgcccaacgacccccgcccattgacgtcaataatgacgtatgttcccatagtaacgccaatagggactttccattgacgtcaatgggtggagtatttacggtaaactgcccacttggcagtacatcaagtgtatcatatgccaagtacgccccctattgacgtcaatgacggtaaatggcccgcctggcattatgcccagtacatgaccttatgggactttcctacttggcagtacatctacgtattagtcatcgctattaccatggtgatgcggttttggcagtacatcaatgggcgtggatagcggtttgactcacggggatttccaagtctccaccccattgacgtcaatgggagtttgttttggcaccaaaatcaacgggactttccaaaatgtcgtaacaactccgccccattgacgcaaatgggcggtaggcgtgtacggtgggaggtctatataagcagagctggtttagtgaaccgtcagatcgttcactgccgtataggcagggcccagactgagcacgtgagttttagagctagaaatagcaagttaaaataaggctagtccgttatcaacttgaaaaagtgggaccgagtcggtcctctgccatcaaagcgtgctcagtctgtttgtttcaaaagtagactgtacgctaagggtcatatctttttttgtttggtttgtgtcttggttggcgtcttaaa

SEQ ID NO: 227 - DNA, 743 bp, Artificial Sequence
  Synthetic
ctaaggaccagcttctttgggagagaacagacgcaggggcgggagggaaaaagggagaggcagacgtcacttccccttggcggctctggcagcagattggtcggttgagtggcagaaaggcagacggggactgggcaaggcactgtcggtgacatcacggacagggcgacttctatgtagatgaggcagcgcagaggctgctgcttcgccacttgctgcttcaccacgaaggagttcccgtgccctgggagcgggttcaggaccgctgatcggaagtgagaatcccagctgtgtgtcagggctggaaagggctcgggagtgcgcggggcaagtgaccgtgtgtgtaaagagtgaggcgtatgaggctgtgtcggggcagaggcccaagatctcagttcactgccgtataggcagggcccagactgagcacgtgagttttagagctagaaatagcaagttaaaataaggctagtccgttatcaacttgaaaaagtgggaccgagtcggtcctctgccatcaaagcgtgctcagtctgtttcagcaagttcagagaaatctgaacttgctggatttttggagcagggagatggaataggagcttgctccgtccactccacgcatcgacctggtattgcagtacctccaggaacggtgcacccactttctggagtttcaaaagtagactgtacgctaagggtcatatctttttttgtttggtttgtgtcttggttggcgtcttaaa

SEQ ID NO: 228 - DNA, 141 bp, Artificial Sequence
  Synthetic
ggcccagactgagcacgtgagttttagagctagctcatgaaaatgagctagcaagttaaaataaggctagtccgttatcaacttgaaaaagtgggaccgagtcggtcctctgccatcaaagcgtgctcagtctgttttttt

SEQ ID NO: 229 - DNA, 129 bp, Artificial Sequence
  Synthetic
ggcccagactgagcacgtgagtttgagagctagaaatagcaagtttaaataaggctagtccgttatcaacttgaaaaagtgggaccgagtcggtcctctgccatcaaagcgtgctcagtctgttttttt

SEQ ID NO: 230 - DNA, 197 bp, Artificial Sequence
  Synthetic
ggcccagactgagcacgtgagttttagagctagaaatagcaagttaaaataaggctagtccgttatcaacttgaaaaagtgggaccgagtcggtcctctgccatcaaagcgtgctcagtctgggccggcatggtcccagcctcctcgctggcgccggctgggcaacatgcttcggcatggcgaatgggacttttttt

SEQ ID NO: 231 - DNA, 171 bp, Artificial Sequence
  Synthetic
ggtgggagacgtcccaccggcccagactgagcacgtgagttttagagctagaaatagcaagttaaaataaggctagtccgttatcaacttgaaaaagtgggaccgagtcggtcctctgccatcaaagcttcgaccgtgctcagtctggtgggagacgtcccaccttttttt

SEQ ID NO: 232 - DNA, 180 bp, Artificial Sequence
  Synthetic
gagcagcatggcgtcgctgctcacggcccagactgagcacgtgagttttagagctagaaatagcaagttaaaataaggctagtccgttatcaacttgaaaaagtgggaccgagtcggtcctctgccatcaaagcttcgaccgtgctcagtctccatcagttgacaccctgaggttttttt

SEQ ID NO: 233 - DNA, 188 bp, Artificial Sequence
  Synthetic
gcagacctaagtggugacatatggtctgggcccagactgagcacgtgagttttagagctauacgtagcaagttaaaataaggctagtccgttatcaacttuacgaagtgggaccgagtcggtcctctgccatcaaagcttcgaccgtgctcagtctgcatgcgattagaaataatcgcatgttttttt

SEQ ID NO: 234 - DNA, 125 bp, Artificial Sequence
  Synthetic
tctgccatcaaagctgcgaccgtgctcagtctggtgggagacgtcccaccggccggcatggtcccagcctcctcgctggcgccggctgggcaacatgcttcggcatggcgaatgggacttttttt

SEQ ID NO: 235 - protein, 328 aa, Artificial Sequence; identical to SEQ ID NO: 129
  Synthetic

SEQ ID NO: 236 - protein, 128 aa, Artificial Sequence
  Synthetic
MEPIEEATKCYDQMLIVERYERVISYLYPIAQSIPRKHGVAREMFLKCLLGQVELFIVAGKSNQVSKLYAADAGLAMLRFWLRFLAGIQKPHAMTPHQVETAQVLIAEVGRILGSWIARVNRKGQAGK

SEQ ID NO: 237 - RNA, 169 nt, Artificial Sequence
  Synthetic
accuucuugcauggcucugccaacgcuacggcuuggcgggcuggccuuuccucaauagguggucagccgguucuguccugcuucggcgaacacguuacacgguucggcaaaacgucgauuacugaaaauggaaaggcggggccgacuucaagggcaggcugggaaauaa

SEQ ID NO: 238 - RNA, 149 nt, Artificial Sequence
  Synthetic
accuucuugcauggcucugccaacgcuacggcuuggcgggcuggccuuuccucaauagguggucagccgguucuguccugcuucggcgaacacguuacacgguucggcaaaacgucgauuacugaaaauggaaaggcggggccgacuuc

SEQ ID NO: 239 - RNA, 85 nt, Artificial Sequence
  Synthetic
accuucuugcauggcucugccaacgcuacggcuuggcgggcuggccuuuccucaauagguggucaaagggcaggcugggaaauaa

SEQ ID NO: 240 - RNA, 160 nt, Artificial Sequence
  Synthetic
cauggcucugccaacgcuacggcuuggcgggcuggccuuuccucaauagguggucagccgguucuguccugcuucggcgaacacguuacacgguucggcaaaacgucgauuacugaaaauggaaaggcggggccgacuucaagggcaggcugggaaauaa

SEQ ID NO: 241 - RNA, 140 nt, Artificial Sequence
  Synthetic
cauggcucugccaacgcuacggcuuggcgggcuggccuuuccucaauagguggucagccgguucuguccugcuucggcgaacacguuacacgguucggcaaaacgucgauuacugaaaauggaaaggcggggccgacuuc

SEQ ID NO: 242 - RNA, 76 nt, Artificial Sequence
  Synthetic
cauggcucugccaacgcuacggcuuggcgggcuggccuuuccucaauagguggucaaagggcaggcugggaaauaa

SEQ ID NO: 243 - RNA, 56 nt, Artificial Sequence
  Synthetic
cauggcucugccaacgcuacggcuuggcgggcuggccuuuccucaauaggugguca

SEQ ID NO: 244 - RNA, 169 nt, Artificial Sequence
  Synthetic
accuucuugcauggcucugccaacgcuacggcuuggcgggcuggccuuuccucaauagaugagccgccgguucuguccugcuucggcgaacacguuacacgguucggcaaaacgucgauuacugaaaauggaaaggcggggccgacuucaagggcaggcugggaaauaa

SEQ ID NO: 245 - protein, 15 aa, Artificial Sequence
  Synthetic
GLNDIFEAQKIEWHE

SEQ ID NO: 246 - protein, 4 aa, Artificial Sequence
  Synthetic
EPEA

SEQ ID NO: 247 - protein, 26 aa, Artificial Sequence
  Synthetic
KRRWKKNFIAVSAANRFKKISSSGAL

SEQ ID NO: 248 - protein, 6 aa, Artificial Sequence
  Synthetic
EEEEEE

SEQ ID NO: 249 - protein, 13 aa, Artificial Sequence
  Synthetic
GAPVPYPDPLEPR

SEQ ID NO: 250-251 - skipped (2 entries)

SEQ ID NO: 252 - protein, 1 aa, Artificial Sequence
  Synthetic
H

SEQ ID NO: 253 - protein, 2 aa, Artificial Sequence
  Synthetic
HH

SEQ ID NO: 254 - protein, 3 aa, Artificial Sequence
  Synthetic
HHH

SEQ ID NO: 255 - protein, 4 aa, Artificial Sequence
  Synthetic
HHHH

SEQ ID NO: 256 - protein, 5 aa, Artificial Sequence
  Synthetic
HHHHH

SEQ ID NO: 257 - protein, 6 aa, Artificial Sequence
  Synthetic
HHHHHH

SEQ ID NO: 258 - protein, 7 aa, Artificial Sequence
  Synthetic
HHHHHHH

SEQ ID NO: 259 - protein, 8 aa, Artificial Sequence
  Synthetic
HHHHHHHH

SEQ ID NO: 260 - protein, 9 aa, Artificial Sequence
  Synthetic
HHHHHHHHH

SEQ ID NO: 261 - protein, 10 aa, Artificial Sequence
  Synthetic
HHHHHHHHHH

SEQ ID NO: 262 - protein, 25 aa, Artificial Sequence
  Synthetic
HHHHHHHHHHHHHHHHHHHHHHHHH

SEQ ID NO: 263 - skipped

SEQ ID NO: 264 - protein, 18 aa, Artificial Sequence
  Synthetic
TKENPRSNQEESYDDNES

SEQ ID NO: 265 - protein, 9 aa, Artificial Sequence
  Synthetic
TETSQVAPA

SEQ ID NO: 266 - protein, 15 aa, Artificial Sequence
  Synthetic
KETAAAKFERQHMDS

SEQ ID NO: 267 - protein, 38 aa, Artificial Sequence
  Synthetic
MDEKTTGWRGGHVVEGLAGELEQLRARLEHHPQGQREP

SEQ ID NO: 268 - protein, 13 aa, Artificial Sequence
  Synthetic
SLAELLNAGLGGS

SEQ ID NO: 269 - protein, 8 aa, Artificial Sequence
  Synthetic
TQDPSRVG

SEQ ID NO: 270 - protein, 12 aa, Artificial Sequence
  Synthetic
PDRVRAVSHWSS

SEQ ID NO: 271 - protein, 8 aa, Artificial Sequence
  Synthetic
WSHPQFEK

SEQ ID NO: 272 - protein, 6 aa, Artificial Sequence
  Synthetic
CCPGCC

SEQ ID NO: 273 - protein, 10 aa, Artificial Sequence
  Synthetic
EVHTNQDPLD

SEQ ID NO: 274 - skipped

SEQ ID NO: 275 - protein, 11 aa, Artificial Sequence
  Synthetic
YTDIEMNRLGK

SEQ ID NO: 276 - protein, 8 aa, Artificial Sequence
  Synthetic
DLYDDDDK

SEQ ID NO: 277 - RNA, 65 nt, Artificial Sequence
  Synthetic
accuucuugcauggcucugccaacgcuacggcuuggcgggcuggccuuuccucaauaggugguca

SEQ ID NO: 278 - protein, 6 aa, Artificial Sequence
  Synthetic
DTYRYI

SEQ ID NO: 279 - protein, 6 aa, Artificial Sequence
  Synthetic
TDFYLK

SEQ ID NO: 280 - protein, 11 aa, Artificial Sequence
  Synthetic
MASMTGGQQMG

SEQ ID NO: 281 - protein, 6 aa, Artificial Sequence
  Synthetic
QYPALT

SEQ ID NO: 282 - protein, 10 aa, Artificial Sequence
  Synthetic
SSTSSDFRDR

SEQ ID NO: 283 - protein, 19 aa, Artificial Sequence
  Synthetic
KDHLIHNVHKEFHAHAHNK

SEQ ID NO: 284 - protein, 8 aa, Artificial Sequence
  Synthetic
QPELAPED

SEQ ID NO: 285 - protein, 5 aa, Artificial Sequence
  Synthetic
RRRRR

SEQ ID NO: 286 - protein, 4 aa, Artificial Sequence
  Synthetic
CCCC

SEQ ID NO: 287 - protein, 11 aa, Artificial Sequence
  Synthetic
FFFFFFFFFFF

SEQ ID NO: 288 - protein, 9 aa, Artificial Sequence
  Synthetic
NANNPDWDF

SEQ ID NO: 289-290 - skipped (2 entries)

SEQ ID NO: 291 - protein, 253 aa, Artificial Sequence
  Synthetic
MANLGCWMLVLFVATWSDLGLCKKRPKPGGWNTGGSRYPGQGSPGGNRYPPQGGGGWGQPHGGGWGQPHGGGWGQPHGGGWGQPHGGGWGQGGGTHSQWNKPSKPKTNMKHMAGAAAAGAVVGGLGGYMLGSAMSRPIIHFGSDYEDRYYRENMHRYPNQVYYRPMDEYSNQNNFVHDCVNITIKQHTVTTTTKGENFTETDVKMMERVVEQMCITQYERESQAYYQRGSSMVLFSSPPVILLISFLIFLIVG

SEQ ID NO: 292 - DNA, 2365 bp, Homo sapiens
gcgaaccttggctgctggatgctggttctctttgtggccacatggagtgacctgggcctctgcaagaagcgcccgaagcctggaggatggaacactgggggcagccgatacccggggcagggcagccctggaggcaaccgctacccacctcagggcggtggtggctgggggcagcctcatggtggtggctgggggcagcctcatggtggtggctgggggcagccccatggtggtggctggggacagcctcatggtggtggctggggtcaaggaggtggcacccacagtcagtggaacaagccgagtaagccaaaaaccaacatgaagcacatggctggtgctgcagcagctggggcagtggtggggggccttggcggctacatgctgggaagtgccatgagcaggcccatcatacatttcggcagtgactatgaggaccgttactatcgtgaaaacatgcaccgttaccccaaccaagtgtactacaggcccatggatgagtacagcaaccagaacaactttgtgcacgactgcgtcaatatcacaatcaagcagcacacggtcaccacaaccaccaagggggagaacttcaccgagaccgacgttaagatgatggagcgcgtggttgagcagatgtgtatcacccagtacgagagggaatctcaggcctattaccagagaggatcgagcatggtcctcttctcctctccacctgtgatcctcctgatctctttcctcatcttcctgatagtgggatgaggaaggtcttcctgttttcaccatctttctaatctttttccagcttgagggaggcggtatccacctgcagcccttttagtggtggtgtctcactctttcttctctctttgtcccggataggctaatcaatacccttggcactgatgggcactggaaaacatagagtagacctgagatgctggtcaagccccctttgattgagttcatcatgagccgttgctaatgccaggccagtaaaagtataacagcaaataaccattggttaatctggacttatttttggacttagtgcaacaggttgaggctaaaacaaatctcagaacagtctgaaatacctttgcctggatacctctggctccttcagcagctagagctcagtatactaatgccctatcttagtagagatttcatagctatttagagatattttccattttaagaaaacccgacaacatttctgccaggtttgttaggaggccacatgatacttattcaaaaaaatcctagagattcttagctcttgggatgcaggctcagcccgctggagcatgagctctgtgtgtaccgagaactggggtgatgttttacttttcacagtatgggctacacagcagctgttcaacaagagtaaatattgtcacaacactgaacctctggctagaggacatattcacagtgaacataactgtaacatatatgaaaggcttctgggacttgaaatcaaatgtttgggaatggtgcccttggaggcaacctcccattttagatgtttaaaggaccctatatgtggcattcctttctttaaactataggtaattaaggcagctgaaaagtaaattgccttctagacactgaaggcaaatctcctttgtccatttacctggaaaccagaatgattttgacatacaggagagctgcagttgtgaaagcaccatcatcatagaggatgatgtaattaaaaaatggtcagtgtgcaaagaaaagaactgcttgcatttctttatttctgtctcataattgtcaaaaaccagaattaggtcaagttcatagtttctgtaattggcttttgaatcaaagaatagggagacaatctaaaaaatatcttaggttggagatgacagaaatatgattgatttgaagtggaaaaagaaattctgttaatgttaattaaagtaaaattattccctgaattgtttgatattgtcacctagcagatatgtattacttttctgcaatgttattattggcttgcactttgtgagtattctatgtaaaaatatatatgtatataaaatatatattgcataggacagacttaggagttttgtttagagcagttaacatctgaagtgtctaatgcattaacttttgtaaggtactgaatacttaatatgtgggaaacccttttgcgtggtccttaggcttacaatgtgcactgaatcgtttcatgtaagaatccaaagtggacaccattaacaggtctttgaaatatgcatgtactttatattttctatatttgtaactttgcatgttcttgttttgttatataaaaaaattgtaaatgtttaatatctgactgaaattaaacgagcgaagatgagcacca

SEQ ID NO: 293 - protein, 253 aa, Artificial Sequence
  Synthetic
MANLGCWMLVLFVATWSDLGLCKKRPKPGGWNTGGSRYPGQGSPGGNRYPPQGGGGWGQPHGGGWGQPHGGGWGQPHGGGWGQPHGGGWGQGGGTHSQWNKPSKPKTNMKHMAGAAAAGAVVGGLGGYMLGSAMSRPIIHFGSDYEDRYYRENMHRYPNQVYYRPMDEYSNQNNFVHNCVNITIKQHTVTTTTKGENFTETDVKMMERVVEQMCITQYERESQAYYQRGSSMVLFSSPPVILLISFLIFLIVG

SEQ ID NO: 294 - protein, 253 aa, Artificial Sequence
  Synthetic
MANLGCWMLVLFVATWSDLGLCKKRPKPGGWNTGGSRYPGQGSPGGNRYPPQGGGGWGQPHGGGWGQPHGGGWGQPHGGGWGQPHGGGWGQGGGTHSQWNKPSKPKTNMKHMAGAAAAGAVVGGLGGYMLGSAMSRPIIHFGSDYEDRYYRENMHRYPNQVYYRPMDEYSNQNNFVHDCVNITIKQHKVTTTTKGENFTETDVKMMERVVEQMCITQYERESQAYYQRGSSMVLFSSPPVILLISFLIFLIVG

SEQ ID NO: 295 - protein, 253 aa, Artificial Sequence
  Synthetic
MANLGCWMLVLFVATWSDLGLCKKRPKPGGWNTGGSRYPGQGSPGGNRYPPQGGGGWGQPHGGGWGQPHGGGWGQPHGGGWGQPHGGGWGQGGGTHSQWNKPSKPKTNMKHMAGAAAAGAVVGGLGGYMLGSAMSRPIIHFGSDYEDRYYRENMHRYPNQVYYRPMDEYSNQNNFVHDCVNITIKQHTVTTTTKGKNFTETDVKMMERVVEQMCITQYERESQAYYQRGSSMVLFSSPPVILLISFLIFLIVG

SEQ ID NO: 296 - protein, 253 aa, Artificial Sequence
  Synthetic
MANLGCWMLVLFVATWSDLGLCKKRPKPGGWNTGGSRYPGQGSPGGNRYPPQGGGGWGQPHGGGWGQPHGGGWGQPHGGGWGQPHGGGWGQGGGTHSQWNKPSKPKTNMKHMAGAAAAGAVVGGLGGYMLGSAMSRPIIHFGSDYEDRYYRENMHRYPNQVYYRPMDEYSNQNNFVHDCVNITIKQHTVTTTTKGANFTETDVKMMERVVEQMCITQYERESQAYYQRGSSMVLFSSPPVILLISFLIFLIVG

SEQ ID NO: 297 - protein, 253 aa, Artificial Sequence
  Synthetic
MANLGCWMLVLFVATWSDLGLCKKRPKPGGWNTGGSRYPGQGSPGGNRYPPQGGGGWGQPHGGGWGQPHGGGWGQPHGGGWGQPHGGGWGQGGGTHSQWNKPSKPKTNMKHMAGAAAAGAVVGGLGGYMLGSAMSRPIIHFGSDYEDRYYRENMHRYPNQVYYRPMDEYSNQNNFVHDCVNITIKQHTVTTTTKGENFTKTDVKMMERVVEQMCITQYERESQAYYQRGSSMVLFSSPPVILLISFLIFLIVG

SEQ ID NO: 298 - protein, 253 aa, Artificial Sequence
  Synthetic
MANLGCWMLVLFVATWSDLGLCKKRPKPGGWNTGGSRYPGQGSPGGNRYPPQGGGGWGQPHGGGWGQPHGGGWGQPHGGGWGQPHGGGWGQGGGTHSQWNKPSKPKTNMKHMAGAAAAGAVVGGLGGYMLGSAMSRPIIHFGSDYEDRYYRENMHRYPNQVYYRPMDEYSNQNNFVHDCVNITIKQHTVTTTTKGENFTGTDVKMMERVVEQMCITQYERESQAYYQRGSSMVLFSSPPVILLISFLIFLIVG

SEQ ID NO: 299 - protein, 253 aa, Artificial Sequence
  Synthetic
MANLGCWMLVLFVATWSDLGLCKKRPKPGGWNTGGSRYPGQGSPGGNRYPPQGGGGWGQPHGGGWGQPHGGGWGQPHGGGWGQPHGGGWGQGGGTHSQWNKPSKPKTNMKHMAGAAAAGAVVGGLGGYMLGSAMSRPIIHFGSDYEDRYYRENMHRYPNQVYYRPMDEYSNQNNFVHDCVNITIKQHTVTTTTKGENFTETDIKMMERVVEQMCITQYERESQAYYQRGSSMVLFSSPPVILLISFLIFLIVG

SEQ ID NO: 300 - protein, 253 aa, Artificial Sequence
  Synthetic
MANLGCWMLVLFVATWSDLGLCKKRPKPGGWNTGGSRYPGQGSPGGNRYPPQGGGGWGQPHGGGWGQPHGGGWGQPHGGGWGQPHGGGWGQGGGTHSQWNKPSKPKTNMKHMAGAAAAGAVVGGLGGYMLGSAMSRPIIHFGSDYEDRYYRENMHRYPNQVYYRPMDEYSNQNNFVHDCVNITIKQHTVTTTTKGENFTETDVKMMEHVVEQMCITQYERESQAYYQRGSSMVLFSSPPVILLISFLIFLIVG

SEQ ID NO: 301 - protein, 253 aa, Artificial Sequence
  Synthetic
MANLGCWMLVLFVATWSDLGLCKKRPKPGGWNTGGSRYPGQGSPGGNRYPPQGGGGWGQPHGGGWGQPHGGGWGQPHGGGWGQPHGGGWGQGGGTHSQWNKPSKPKTNMKHMAGAAAAGAVVGGLGGYMLGSAMSRPIIHFGSDYEDRYYRENMHRYPNQVYYRPMDEYSNQNNFVHDCVNITIKQHTVTTTTKGENFTETDVKMMERVIEQMCITQYERESQAYYQRGSSMVLFSSPPVILLISFLIFLIVG

SEQ ID NO: 302 - protein, 253 aa, Artificial Sequence
  Synthetic
MANLGCWMLVLFVATWSDLGLCKKRPKPGGWNTGGSRYPGQGSPGGNRYPPQGGGGWGQPHGGGWGQPHGGGWGQPHGGGWGQPHGGGWGQGGGTHSQWNKPSKPKTNMKHMAGAAAAGAVVGGLGGYMLGSAMSRPIIHFGSDYEDRYYRENMHRYPNQVYYRPMDEYSNQNNFVHDCVNITIKQHTVTTTTKGENFTETDVKMMERVVQQMCITQYERESQAYYQRGSSMVLFSSPPVILLISFLIFLIVG

SEQ ID NO: 303 - protein, 253 aa, Artificial Sequence
  Synthetic
MANLGCWMLVLFVATWSDLGLCKKRPKPGGWNTGGSRYPGQGSPGGNRYPPQGGGGWGQPHGGGWGQPHGGGWGQPHGGGWGQPHGGGWGQGGGTHSQWNKPSKPKTNMKHMAGAAAAGAVVGGLGGYMLGSAMSRPIIHFGSDYEDRYYRENMHRYPNQVYYRPMDEYSNQNNFVHDCVNITIKQHTVTTTTKGENFTETDVKMMERVVEQMCITQYERESQAYYQRGSSRVLFSSPPVILLISFLIFLIVG

SEQ ID NO: 304 - protein, 253 aa, Artificial Sequence
  Synthetic
MANLGCWMLVLFVATWSDLGLCKKRPKPGGWNTGGSRYPGQGSPGGNRYPPQGGGGWGQPHGGGWGQPHGGGWGQPHGGGWGQPHGGGWGQGGGTHSQWNKLSKPKTNMKHMAGAAAAGAVVGGLGGYMLGSAMSRPIIHFGSDYEDRYYRENMHRYPNQVYYRPMDEYSNQNNFVHDCVNITIKQHTVTTTTKGENFTETDVKMMERVVEQMCITQYERESQAYYQRGSSMVLFSSPPVILLISFLIFLIVG

SEQ ID NO: 305 - protein, 253 aa, Artificial Sequence
  Synthetic
MANLGCWMLVLFVATWSDLGLCKKRPKPGGWNTGGSRYPGQGSPGGNRYPPQGGGGWGQPHGGGWGQPHGGGWGQPHGGGWGQPHGGGWGQGGGTHSQWNKPSKLKTNMKHMAGAAAAGAVVGGLGGYMLGSAMSRPIIHFGSDYEDRYYRENMHRYPNQVYYRPMDEYSNQNNFVHDCVNITIKQHTVTTTTKGENFTETDVKMMERVVEQMCITQYERESQAYYQRGSSMVLFSSPPVILLISFLIFLIVG

SEQ ID NO: 306 - protein, 253 aa, Artificial Sequence
  Synthetic
MANLGCWMLVLFVATWSDLGLCKKRPKPGGWNTGGSRYPGQGSPGGNRYPPQGGGGWGQPHGGGWGQPHGGGWGQPHGGGWGQPHGGGWGQGGGTHSQWNKPSKPKTNMKHMAGAAVAGAVVGGLGGYMLGSAMSRPIIHFGSDYEDRYYRENMHRYPNQVYYRPMDEYSNQNNFVHDCVNITIKQHTVTTTTKGENFTETDVKMMERVVEQMCITQYERESQAYYQRGSSMVLFSSPPVILLISFLIFLIVG

SEQ ID NO: 307 - protein, 253 aa, Artificial Sequence
  Synthetic
MANLGCWMLVLFVATWSDLGLCKKRPKPGGWNTGGSRYPGQGSPGGNRYPPQGGGGWGQPHGGGWGQPHGGGWGQPHGGGWGQPHGGGWGQGGGTHSQWNKPSKPKTNMKHMAGAAAAGAVVGGLGGYMLVSAMSRPIIHFGSDYEDRYYRENMHRYPNQVYYRPMDEYSNQNNFVHDCVNITIKQHTVTTTTKGENFTETDVKMMERVVEQMCITQYERESQAYYQRGSSMVLFSSPPVILLISFLIFLIVG

SEQ ID NO: 308 - protein, 253 aa, Artificial Sequence
  Synthetic
MANLGCWMLVLFVATWSDLGLCKKRPKPGGWNTGGSRYPGQGSPGGNRYPPQGGGGWGQPHGGGWGQPHGGGWGQPHGGGWGQPHGGGWGQGGGTHSQWNKPSKPKTNMKHMAGAAAAGAVVGGLGGYMLGSAMSRPIIHFGSDYEDRYYRENMHRYPNQVYYRPMDEYSNQNNFGHDCVNITIKQHTVTTTTKGENFTETDVKMMERVVEQMCITQYERESQAYYQRGSSMVLFSSPPVILLISFLIFLIVG

SEQ ID NO: 309 - protein, 253 aa, Artificial Sequence
  Synthetic
MANLGCWMLVLFVATWSDLGLCKKRPKPGGWNTGGSRYPGQGSPGGNRYPPQGGGGWGQPHGGGWGQPHGGGWGQPHGGGWGQPHGGGWGQGGGTHSQWNKPSKPKTNMKHMAGAAAAGAVVGGLGGYMLGSAMSRPIIHFGSDYEDRYYRENMHRYPNQVYYRPMDEYSNQNNFVHDCVNITIKQRTVTTTTKGENFTETDVKMMERVVEQMCITQYERESQAYYQRGSSMVLFSSPPVILLISFLIFLIVG

SEQ ID NO: 310 - skipped

SEQ ID NO: 311 - protein, 253 aa, Artificial Sequence
  Synthetic
MANLGCWMLVLFVATWSDLGLCKKRPKPGGWNTGGSRYPGQGSPGGNRYPPQGGGGWGQPHGGGWGQPHGGGWGQPHGGGWGQPHGGGWGQGGGTHSQWNKPSKPKTNMKHMAGAAAAGAVVGGLGGYMLGSAMSRPIIHFGSDYEDRYYRENMHRYPNQVYYRPMDEYSNQNNFVHDCVNITIKQHTVTTTTKGENSTETDVKMMERVVEQMCITQYERESQAYYQRGSSMVLFSSPPVILLISFLIFLIVG

SEQ ID NO: 312 - protein, 253 aa, Artificial Sequence
  Synthetic
MANLGCWMLVLFVATWSDLGLCKKRPKPGGWNTGGSRYPGQGSPGGNRYPPQGGGGWGQPHGGGWGQPHGGGWGQPHGGGWGQPHGGGWGQGGGTHSQWNKPSKPKTNMKHMAGAAAAGAVVGGLGGYMLGSAMSRPIIHFGSDYEDRYYRENMHRYPNQVYYRPMDEYSNQNNFVHDCVNITIKQHTVTTTTKGENFTETNVKMMERVVEQMCITQYERESQAYYQRGSSMVLFSSPPVILLISFLIFLIVG

SEQ ID NO: 313 - protein, 253 aa, Artificial Sequence
  Synthetic
MANLGCWMLVLFVATWSDLGLCKKRPKPGGWNTGGSRYPGQGSPGGNRYPPQGGGGWGQPHGGGWGQPHGGGWGQPHGGGWGQPHGGGWGQGGGTHSQWNKPSKPKTNMKHMAGAAAAGAVVGGLGGYMLGSAMSRPIIHFGSDYEDRYYRENMHRYPNQVYYRPMDEYSNQNNFVHDCVNITIKQHTVTTTTKGENFTETDVKMMERVVEPMCITQYERESQAYYQRGSSMVLFSSPPVILLISFLIFLIVG

SEQ ID NO: 314 - protein, 253 aa, Artificial Sequence
  Synthetic
MANLGCWMLVLFVATWSDLGLCKKRPKPGGWNTGGSRYPGQGSPGGNRYPPQGGGGWGQPHGGGWGQPHGGGWGQPHGGGWGQPHGGGWGQGGGTHSQWNKPSKPKTNMKHMAGAAAAGAVVGGLGGYMLGSAMSRPIIHFGSDYEDRYYRENMHRYPNQVYYRPMDEYSNQNNFVHDCVNITIKQHTVTTTTKGENFTETDVKMMERVVEQMCITRYERESQAYYQRGSSMVLFSSPPVILLISFLIFLIVG

SEQ ID NO: 315 - protein, 253 aa, Artificial Sequence
  Synthetic
MANLGCWMLVLFVATWSDLGLCKKRPKPGGWNTGGSRYPGQGSPGGNRYPPQGGGGWGQPHGGGWGQPHGGGWGQPHGGGWGQPHGGGWGQGGGTHSQWNKPSKPKTNMKHMAGAAAAGAVVGGLGGYMLGSAMSRPIIHFGSDYEDRYYRENMHRYPNQVYYRPMDEYSNQNNFVHDCVNITIKQHTVTTTTKGENFTETDVKMMERVVEQMCITQYERESQAYYQRGSSTVLFSSPPVILLISFLIFLIVG

SEQ ID NO: 316 - protein, 253 aa, Artificial Sequence
  Synthetic
MANLGCWMLVLFVATWSDLGLCKKRPKPGGWNTGGSRYPGQGSPGGNRYPPQGGGGWGQPHGGGWGQPHGGGWGQPHGGGWGQPHGGGWGQGGGTHSQWNKPSKPKTNMKHMAGAAAAGAVVGGLGSYMLGSAMSRPIIHFGSDYEDRYYRENMHRYPNQVYYRPMDEYSNQNNFVHDCVNITIKQHTVTTTTKGENFTETDVKMMERVVEQMCITQYERESQAYYQRGSSMVLFSSPPVILLISFLIFLIVG

SEQ ID NO: 317 - protein, 253 aa, Artificial Sequence
  Synthetic
MANLGCWMLVLFVATWSDLGLCKKRPKPGGWNTGGSRYPGQGSPGGNRYPPQGGGGWGQPHGGGWGQPHGGGWGQPHGGGWGQPHGGGWGQGGGTHSQWNKPSKPKTNMKHMAGAAAAGAVVGGLGVYMLGSAMSRPIIHFGSDYEDRYYRENMHRYPNQVYYRPMDEYSNQNNFVHDCVNITIKQHTVTTTTKGENFTETDVKMMERVVEQMCITQYERESQAYYQRGSSMVLFSSPPVILLISFLIFLIVG

SEQ ID NO: 318 - protein, 253 aa, Artificial Sequence
  Synthetic
MANLGCWMLVLFVATWSDLGLCKKRPKPGGWNTGGSRYPGQGSPGGNRYPPQGGGGWGQPHGGGWGQPHGGGWGQPHGGGWGQPHGGGWGQGGGTHSQWNKPSKPKTNMKHMAGAAAAGAVVGGLGGYVLGSAMSRPIIHFGSDYEDRYYRENMHRYPNQVYYRPMDEYSNQNNFVHDCVNITIKQHTVTTTTKGENFTETDVKMMERVVEQMCITQYERESQAYYQRGSSMVLFSSPPVILLISFLIFLIVG

SEQ ID NO: 319 - protein, 253 aa, Artificial Sequence
  Synthetic
MANLGCWMLVLFVATWSDLGLCKKRPKPGGWNTGGSRYPGQGSPGGNRYPPQGGGGWGQPHGGGWGQPHGGGWGQPHGGGWGQPHGGGWGQGGGTHSQWNKPSKPKTNMKHMAGAAAAGAVVGGLGGYMLGSAMSRPIIHFGSDYEDRYYRENMHRYPNQVYYRPMGEYSNQNNFVHDCVNITIKQHTVTTTTKGENFTETDVKMMERVVEQMCITQYERESQAYYQRGSSMVLFSSPPVILLISFLIFLIVG

SEQ ID NO: 320 - protein, 253 aa, Artificial Sequence
  Synthetic
MANLGCWMLVLFVATWSDLGLCKKRPKPGGWNTGGSRYPGQGSPGGNRYPPQGGGGWGQPHGGGWGQPHGGGWGQPHGGGWGQPHGGGWGQGGGTHSQWNKPSKPKTNMKHMAGAAAAGAVVGGLGGYMLGSAMSRPIIHFGSDYEDRYYRENMHRYPNQVYYRPMNEYSNQNNFVHDCVNITIKQHTVTTTTKGENFTETDVKMMERVVEQMCITQYERESQAYYQRGSSMVLFSSPPVILLISFLIFLIVG

SEQ ID NO: 321 - protein, 253 aa, Artificial Sequence
  Synthetic
MANLGCWMLVLFVATWSDLGLCKKRPKPGGWNTGGSRYPGQGSPGGNRYPPQGGGGWGQPHGGGWGQPHGGGWGQPHGGGWGQPHGGGWGQGGGTHSQWNKPSKPKTNMKHMAGAAAAGAVVGGLGGYMLGSAMSRPIIHFGSDYEDRYYRENMHRYPNQVYYRPMDEYSSQNNFVHDCVNITIKQHTVTTTTKGENFTETDVKMMERVVEQMCITQYERESQAYYQRGSSMVLFSSPPVILLISFLIFLIVG

SEQ ID NO: 322 - protein, 253 aa, Artificial Sequence [sequence omitted]

SEQ ID NO: 323 - protein, 253 aa, Artificial Sequence
  Synthetic
MANLGCWMLVLFVATWSDLGLCKKRPKPGGWNTGGSRYPGQGSPGGNRYPPQGGGGWGQPHGGGWGQPHGGGWGQPHGGGWGQPHGGGWGQGGGTHSQWNKPSKPKTNMKHMAGAAAAGAVVGGLGGYMLGSAMSRPIIHFGSDYEDRYYRENMHRYPNQVYYRPMDEYSNQNNFVHDCVNITIKQHTVTTTTKGENFTETDVKMMERVVEQMCITQYERESQAYYQRGSSMVLFSSSPVILLISFLIFLIVG

SEQ ID NO: 324 - DNA, 119 bp, Homo sapiens
gcagtggtggggggccttgggttttagagctagaaatagcaagttaaaataaggctagtccgttatcaacttgaaaaagtggcaccgagtcggtgcatgtagacgccaaggccccccac

SEQ ID NO: 325 - DNA, 119 bp, Homo sapiens
tgtgtatcacccagtacgaggttttagagctagaaatagcaagttaaaataaggctagtccgttatcaacttgaaaaagtggcaccgagtcggtgcagattctctcttgtactgggtga

SEQ ID NO: 326 - DNA, 119 bp, Bos Taurus
gcagtggtagggggccttgggttttagagctagaaatagcaagttaaaataaggctagtccgttatcaacttgaaaaagtggcaccgagtcggtgcatgtagacaccaaggccccctac

SEQ ID NO: 327 - DNA, 119 bp, Mesocricetus auratus
gccgtggtggggggccttgggttttagagctagaaatagcaagttaaaataaggctagtccgttatcaacttgaaaaagtggcaccgagtcggtgcatgtagacaccaaggccccccac

SEQ ID NO: 328 - DNA, 119 bp, Mus musculus
gcagtagtggggggccttgggttttagagctagaaatagcaagttaaaataaggctagtccgttatcaacttgaaaaagtggcaccgagtcggtgcatgtagacaccaaggccccccac

SEQ ID NO: 329 - DNA, 119 bp, Odocoileus virginianus; identical to SEQ ID NO: 326

SEQ ID NO: 330 - DNA, 119 bp, Unknown
  Mustela putorius furo
gcggttgtggggggcctggggttttagagctagaaatagcaagttaaaataaggctagtccgttatcaacttgaaaaagtggcaccgagtcggtgcatgtagacgcccaggccccccac

SEQ ID NO: 331 - DNA, 122 bp, Unknown
  Polyomavirus simian virus
aacttgtttattgcagcttataatggttacaaataaagcaatagcatcacaaatttcacaaataaagcatttttttcactgcattctagttgtggtttgtccaaactcatcaatgtatctta

SEQ ID NO: 332 - DNA, 252 bp, Artificial Sequence
  Synthetic
atccttccagtcagggccatgtttgagagctagaaatagcaagtttaaataaggctagtccgttatcaacttgaaaaagtgggaccgagtcggtccacctgaaccgtatatctaagatacattgatgagtttggacaaaccacaactagaatgcagtgaaaaaaatgctttatttgtgaaatttgtgatgctattgctttatttgtaaccattataagctgcaataaacaagttctatggccctgactggaa

SEQ ID NO: 333 - DNA, 146 bp, Unknown
  Polyomavirus simian virus
ccatggcccaacttgtttattgcagcttataatggttacaaataaagcaatagcatcacaaatttcacaaataaagcatttttttcactgcattctagttgtggtttgtccaaactcatcaatgtatcttatcatgtctggatctc

SEQ ID NO: 334 - DNA, 276 bp, Artificial Sequence
  Synthetic
atccttccagtcagggccatgtttgagagctagaaatagcaagtttaaataaggctagtccgttatcaacttgaaaaagtgggaccgagtcggtccacctgaaccgtatatcgagatccagacatgataagatacattgatgagtttggacaaaccacaactagaatgcagtgaaaaaaatgctttatttgtgaaatttgtgatgctattgctttatttgtaaccattataagctgcaataaacaagttgggccatggctatggccctgactggaa

SEQ ID NO: 335 - DNA, 244 bp, Unknown
  Polyomavirus simian virus
tgatcataatcaagccatatcacatctgtagaggtttacttgctttaaaaaacctccacacctccccctgaacctgaaacataaaatgaatgcaattgttgttgttaacttgtttattgcagcttataatggttacaaataaagcaatagcatcacaaatttcacaaataaagcatttttttcactgcattctagttgtggtttgtccaaactcatcaatgtatcttatcatgtctggatctgc

SEQ ID NO: 336 - DNA, 374 bp, Artificial Sequence
  Synthetic
atccttccagtcagggccatgtttgagagctagaaatagcaagtttaaataaggctagtccgttatcaacttgaaaaagtgggaccgagtcggtccacctgaaccgtatatcgcagatccagacatgataagatacattgatgagtttggacaaaccacaactagaatgcagtgaaaaaaatgctttatttgtgaaatttgtgatgctattgctttatttgtaaccattataagctgcaataaacaagttaacaacaacaattgcattcattttatgtttcaggttcagggggaggtgtggaggttttttaaagcaagtaaacctctacagatgtgatatggcttgattatgatcactatggccctgactggaa

SEQ ID NO: 337 - DNA, 479 bp, Homo sapiens
acgggtggcatccctgtgacccctccccagtgcctctcctggccctggaagttgccactccagtgcccaccagccttgtcctaataaaattaagttgcatcattttgtctgactaggtgtccttctataatattatggggtggaggggggtggtatggagcaaggggcaagttgggaagacaacctgtagggcctgcggggtctattgggaaccaagctggagtgcagtggcacaatcttggctcactgcaatctccgcctcctgggttcaagcgattctcctgcctcagcctcccgagttgttgggattccaggcatgcatgaccaggctcagctaatttttgtttttttggtagagacggggtttcaccatattggccaggctggtctccaactcctaatctcaggtgatctacccaccttggcctcccaaattgctgggattacaggcgtgaaccactgctcccttccctgtcctt

SEQ ID NO: 338 - DNA, 609 bp, Artificial Sequence
  Synthetic
atccttccagtcagggccatgtttgagagctagaaatagcaagtttaaataaggctagtccgttatcaacttgaaaaagtgggaccgagtcggtccacctgaaccgtatatcaaggacagggaagggagcagtggttcacgcctgtaatcccagcaatttgggaggccaaggtgggtagatcacctgagattaggagttggagaccagcctggccaatatggtgaaaccccgtctctaccaaaaaaacaaaaattagctgagcctggtcatgcatgcctggaatcccaacaactcgggaggctgaggcaggagaatcgcttgaacccaggaggcggagattgcagtgagccaagattgtgccactgcactccagcttggttcccaatagaccccgcaggccctacaggttgtcttcccaacttgccccttgctccataccacccccctccaccccataatattatagaaggacacctagtcagacaaaatgatgcaacttaattttattaggacaaggctggtgggcactggagtggcaacttccagggccaggagaggcactggggaggggtcacagggatgccacccgtctatggccctgactggaa

SEQ ID NO: 339 - DNA, 228 bp, Bos bovis
cgactgtgccttctagttgccagccatctgttgtttgcccctcccccgtgccttccttgaccctggaaggtgccactcccactgtcctttcctaataaaatgaggaaattgcatcgcattgtctgagtaggtgtcattctattctggggggtggggtggggcaggacagcaagggggaggattgggaagacaatagcaggcatgctggggatgcggtgggctctatgg

SEQ ID NO: 340 - DNA, 358 bp, Artificial Sequence
  Synthetic
atccttccagtcagggccatgtttgagagctagaaatagcaagtttaaataaggctagtccgttatcaacttgaaaaagtgggaccgagtcggtccacctgaaccgtatatcccatagagcccaccgcatccccagcatgcctgctattgtcttcccaatcctcccccttgctgtcctgccccaccccaccccccagaatagaatgacacctactcagacaatgcgatgcaatttcctcattttattaggaaaggacagtgggagtggcaccttccagggtcaaggaaggcacgggggaggggcaaacaacagatggctggcaactagaaggcacagtcgctatggccctgactggaa

SEQ ID NO: 341 - DNA, 527 bp, Unknown
  Rabbit beta-globin (rbGlob)
ttcactcctcaggtgcaggctgcctatcagaaggtggtggctggtgtggccaatgccctggctcacaaataccactgagatctttttccctctgccaaaaattatggggacatcatgaagccccttgagcatctgacttctggctaataaaggaaatttattttcattgcaatagtgtgttggaattttttgtgtctctcactcggaaggacatatgggagggcaaatcatttaaaacatcagaatgagtatttggtttagagtttggcaacatatgcccatatgctggctgccatgaacaaaggttggctataaagaggtcatcagtatatgaaacagccccctgctgtccattccttattccatagaaaagccttgacttgaggttagattttttttatattttgttttgtgttatttttttctttaacatccctaaaattttccttacatgttttactagccagatttttcctcctctcctgactactcccagtcatagctgtccctcttctcttatggagatc

SEQ ID NO: 342 - DNA, 657 bp, Artificial Sequence
  Synthetic
atccttccagtcagggccatgtttgagagctagaaatagcaagtttaaataaggctagtccgttatcaacttgaaaaagtgggaccgagtcggtccacctgaaccgtatatcgatctccataagagaagagggacagctatgactgggagtagtcaggagaggaggaaaaatctggctagtaaaacatgtaaggaaaattttagggatgttaaagaaaaaaataacacaaaacaaaatataaaaaaaatctaacctcaagtcaaggcttttctatggaataaggaatggacagcagggggctgtttcatatactgatgacctctttatagccaacctttgttcatggcagccagcatatgggcatatgttgccaaactctaaaccaaatactcattctgatgttttaaatgatttgccctcccatatgtccttccgagtgagagacacaaaaaattccaacacactattgcaatgaaaataaatttcctttattagccagaagtcagatgctcaaggggcttcatgatgtccccataatttttggcagagggaaaaagatctcagtggtatttgtgagccagggcattggccacaccagccaccaccttctgataggcagcctgcacctgaggagtgaactatggccctgactggaa

SEQ ID NO: 343 - DNA, 271 bp, Artificial Sequence
  Synthetic
gggggaggctaactgaaacacggaaggagacaataccggaaggaacccgcgctatgacggcaataaaaagacagaataaaacgcacgggtgttgggtcgtttgttcataaacgcggggttcggtcccagggctggcactctgtcgataccccaccgagaccccattggggccaatacgcccgcgtttcttccttttccccaccccaccccccaagttcgggtgaaggcccagggctcgcagccaacgtcggggcggcaggccctgccatag

SEQ ID NO: 344 - DNA, 401 bp, Artificial Sequence
  Synthetic
atccttccagtcagggccatgtttgagagctagaaatagcaagtttaaataaggctagtccgttatcaacttgaaaaagtgggaccgagtcggtccacctgaaccgtatatcctatggcagggcctgccgccccgacgttggctgcgagccctgggccttcacccgaacttggggggtggggtggggaaaaggaagaaacgcgggcgtattggccccaatggggtctcggtggggtatcgacagagtgccagccctgggaccgaaccccgcgtttatgaacaaacgacccaacacccgtgcgttttattctgtctttttattgccgtcatagcgcgggttccttccggtattgtctccttccgtgtttcagttagcctcccccctatggccctgactggaa

SEQ ID NO: 345 - DNA, 171 bp, Artificial Sequence
  Synthetic
tagggtcatgaaggtttttcttttcctgagaaaacaacacgtattgttttctcaggttttgctttttggcctttttctagcttaaaaaaaaaaaaagcaaaagatgctggtggttggcactcctggtttccaggacggggttcaaatccctgcggcgtctttgctttgact

SEQ ID NO: 346 - DNA, 301 bp, Artificial Sequence
  Synthetic
atccttccagtcagggccatgtttgagagctagaaatagcaagtttaaataaggctagtccgttatcaacttgaaaaagtgggaccgagtcggtccacctgaaccgtatatcagtcaaagcaaagacgccgcagggatttgaaccccgtcctggaaaccaggagtgccaaccaccagcatcttttgctttttttttttttaagctagaaaaaggccaaaaagcaaaacctgagaaaacaatacgtgttgttttctcaggaaaagaaaaaccttcatgaccctactatggccctgactggaa

SEQ ID NO: 347 - DNA, 208 bp, Artificial Sequence
  Synthetic
tgttttggctgggtttttccttgttcgcaccggacacctccagtgaccagacggcaaggtttttatcccagtgtatattggaaaaacatgttatacttttgacaatttaacgtgcctagagctcaaattaaactaataccataacgtaatgcaacttacaacataaataaaggtcaatgtttaatccataaaaaaaaaaaaaaaaaaa

SEQ ID NO: 348 - DNA, 338 bp, Artificial Sequence
  Synthetic
atccttccagtcagggccatgtttgagagctagaaatagcaagtttaaataaggctagtccgttatcaacttgaaaaagtgggaccgagtcggtccacctgaaccgtatatctttttttttttttttttttatggattaaacattgacctttatttatgttgtaagttgcattacgttatggtattagtttaatttgagctctaggcacgttaaattgtcaaaagtataacatgtttttccaatatacactgggataaaaaccttgccgtctggtcactggaggtgtccggtgcgaacaaggaaaaacccagccaaaacactatggccctgactggaa

SEQ ID NO: 349 - DNA, 636 bp, Artificial Sequence
  Synthetic
tgttttggctgggtttttccttgttcgcaccggacacctccagtgaccagacggcaaggtttttatcccagtgtatattggaaaaacatgttatacttttgacaatttaacgtgcctagagctcaaattaaactaataccataacgtaatgcaacttacaacataaataaaggtcaatgtttaatccataaaaaaaaaaaaaaaaaaaacacactgttttggctgggtttttccttgttcgcaccggacacctccagtgaccagacggcaaggtttttatcccagtgtatattggaaaaacatgttatacttttgacaatttaacgtgcctagagctcaaattaaactaataccataacgtaatgcaacttacaacataaataaaggtcaatgtttaatccataaaaaaaaaaaaaaaaaaatctctctgttttggctgggtttttccttgttcgcaccggacacctccagtgaccagacggcaaggtttttatcccagtgtatattggaaaaacatgttatacttttgacaatttaacgtgcctagagctcaaattaaactaataccataacgtaatgcaacttacaacataaataaaggtcaatgtttaatccataaaaaaaaaaaaaaaaaaa

SEQ ID NO: 350 - DNA, 766 bp, Artificial Sequence
  Synthetic
atccttccagtcagggccatgtttgagagctagaaatagcaagtttaaataaggctagtccgttatcaacttgaaaaagtgggaccgagtcggtccacctgaaccgtatatctttttttttttttttttttatggattaaacattgacctttatttatgttgtaagttgcattacgttatggtattagtttaatttgagctctaggcacgttaaattgtcaaaagtataacatgtttttccaatatacactgggataaaaaccttgccgtctggtcactggaggtgtccggtgcgaacaaggaaaaacccagccaaaacagagagatttttttttttttttttttatggattaaacattgacctttatttatgttgtaagttgcattacgttatggtattagtttaatttgagctctaggcacgttaaattgtcaaaagtataacatgtttttccaatatacactgggataaaaaccttgccgtctggtcactggaggtgtccggtgcgaacaaggaaaaacccagccaaaacagtgtgttttttttttttttttttttatggattaaacattgacctttatttatgttgtaagttgcattacgttatggtattagtttaatttgagctctaggcacgttaaattgtcaaaagtataacatgtttttccaatatacactgggataaaaaccttgccgtctggtcactggaggtgtccggtgcgaacaaggaaaaacccagccaaaacactatggccctgactggaa

SEQ ID NO: 351 - DNA, 204 bp, Artificial Sequence
  Synthetic
cagcaagttcagagaaatctgaacttgctggatttttggagcagggagatggaataggagcttgctccgtccactccacgcatcgacctggtattgcagtacctccaggaacggtgcacccactttctggagtttcaaaagtagactgtacgctaagggtcatatctttttttgtttggtttgtgtcttggttggcgtcttaaa

SEQ ID NO: 352 - DNA, 334 bp, Artificial Sequence
  Synthetic
atccttccagtcagggccatgtttgagagctagaaatagcaagtttaaataaggctagtccgttatcaacttgaaaaagtgggaccgagtcggtccacctgaaccgtatatctttaagacgccaaccaagacacaaaccaaacaaaaaaagatatgacccttagcgtacagtctacttttgaaactccagaaagtgggtgcaccgttcctggaggtactgcaataccaggtcgatgcgtggagtggacggagcaagctcctattccatctccctgctccaaaaatccagcaagttcagatttctctgaacttgctgctatggccctgactggaa

SEQ ID NO: 353 - DNA, 73 bp, Artificial Sequence
  Synthetic
gtttcaaaagtagactgtacgctaagggtcatatctttttttgtttggtttgtgtcttggttggcgtcttaaa

SEQ ID NO: 354 - DNA, 203 bp, Artificial Sequence
  Synthetic
atccttccagtcagggccatgtttgagagctagaaatagcaagtttaaataaggctagtccgttatcaacttgaaaaagtgggaccgagtcggtccacctgaaccgtatatctttaagacgccaaccaagacacaaaccaaacaaaaaaagatatgacccttagcgtacagtctacttttgaaacctatggccctgactggaa

SEQ ID NO: 355 - DNA, 73 bp, Artificial Sequence
  Synthetic
gcccggctagctcagtcggtagagcatgagactcttaatctcagggtcgtgggttcgagccccacgttgggcg

SEQ ID NO: 356 - DNA, 203 bp, Artificial Sequence
  Synthetic
atccttccagtcagggccatgtttgagagctagaaatagcaagtttaaataaggctagtccgttatcaacttgaaaaagtgggaccgagtcggtccacctgaaccgtatatccgcccaacgtggggctcgaacccacgaccctgagattaagagtctcatgctctaccgactgagctagccgggcctatggccctgactggaa

SEQ ID NO: 357 - DNA, 49 bp, Artificial Sequence
  Synthetic
gagacggtcgggtccagatattcgtatctgtcgagtagagtgtgggctc

SEQ ID NO: 358 - DNA, 179 bp, Artificial Sequence
  Synthetic
atccttccagtcagggccatgtttgagagctagaaatagcaagtttaaataaggctagtccgttatcaacttgaaaaagtgggaccgagtcggtccacctgaaccgtatatcgagcccacactctactcgacagatacgaatatctggacccgaccgtctcctatggccctgactggaa

SEQ ID NO: 359 - DNA, 98 bp, Artificial Sequence
  Synthetic
gacgcaactgaatgaaatggtgaaggacgggtccaggtgtggctgcttcggcagtgcagcttgttgagtagagtgtgagctccgtaactagtcgcgtc

SEQ ID NO: 360 - DNA, 228 bp, Artificial Sequence
  Synthetic
atccttccagtcagggccatgtttgagagctagaaatagcaagtttaaataaggctagtccgttatcaacttgaaaaagtgggaccgagtcggtccacctgaaccgtatatcgacgcgactagttacggagctcacactctactcaacaagctgcactgccgaagcagccacacctggacccgtccttcaccatttcattcagttgcgtcctatggccctgactggaa

SEQ ID NO: 361 - DNA, 95 bp, Artificial Sequence
  Synthetic
gatgtaactgaatgaaatggtgaaggacgggtccagtaggctgcttcggcagcctacttgttgagtagagtgtgagctccgtaactagttacatc

SEQ ID NO: 362 - DNA, 225 bp, Artificial Sequence
  Synthetic
atccttccagtcagggccatgtttgagagctagaaatagcaagtttaaataaggctagtccgttatcaacttgaaaaagtgggaccgagtcggtccacctgaaccgtatatcgatgtaactagttacggagctcacactctactcaacaagtaggctgccgaagcagcctactggacccgtccttcaccatttcattcagttacatcctatggccctgactggaa

SEQ ID NO: 363 - DNA, 40 bp, Artificial Sequence
  Synthetic
ggcacgtacgaagggacggtgcggagaggagagtacgtgc

SEQ ID NO: 364 - DNA, 170 bp, Artificial Sequence
  Synthetic
atccttccagtcagggccatgtttgagagctagaaatagcaagtttaaataaggctagtccgttatcaacttgaaaaagtgggaccgagtcggtccacctgaaccgtatatcgcacgtactctcctctccgcaccgtcccttcgtacgtgccctatggccctgactggaa

SEQ ID NO: 365 - DNA, 68 bp, Artificial Sequence
  Synthetic
ggccggcatggtcccagcctcctcgctggcgccggctgggcaacatgcttcggcatggcgaatgggac

SEQ ID NO: 366 - DNA, 198 bp, Artificial Sequence
  Synthetic
atccttccagtcagggccatgtttgagagctagaaatagcaagtttaaataaggctagtccgttatcaacttgaaaaagtgggaccgagtcggtccacctgaaccgtatatcgtcccattcgccatgccgaagcatgttgcccagccggcgccagcgaggaggctgggaccatgccggccctatggccctgactggaa

SEQ ID NO: 367 - DNA, 25 bp, Artificial Sequence
  Synthetic
ggactctaggactggactttggact

SEQ ID NO: 368 - DNA, 155 bp, Artificial Sequence
  Synthetic
atccttccagtcagggccatgtttgagagctagaaatagcaagtttaaataaggctagtccgttatcaacttgaaaaagtgggaccgagtcggtccacctgaaccgtatatcagtccaaagtccagtcctagagtccctatggccctgactggaa

SEQ ID NO: 369 - DNA, 1719 bp, Artificial Sequence
  Synthetic
gttcgttgcaacaaattgatgagcaatgcttttttataatgccaactttgtacaaaaaagttggcatgacaagttccaggctttggttttcgctgctgctggcggcagcgttcgcaggacgggcgacggccctctggccctggcctcagaacttccaaacctccgaccagcgctacgtcctttacccgaacaactttcaattccagtacgatgtcagctcggccgcgcagcccggctgctcagtcctcgacgaggccttccagcgctatcgtgacctgcttttcggttccgggtcttggccccgtccttacctcacagggaaacggcatacactggagaagaatgtgttggttgtctctgtagtcacacctggatgtaaccagcttcctactttggagtcagtggagaattataccctgaccataaatgatgaccagtgtttactcctctctgagactgtctggggagctctccgaggtctggagacttttagccagcttgtttggaaatctgctgagggcacattctttatcaacaagactgagattgaggactttccccgctttcctcaccggggcttgctgttggatacatctcgccattacctgccactctctagcatcctggacactctggatgtcatggcgtacaataaattgaacgtgttccactggcatctggtagatgatccttccttcccatatgagagcttcacttttccagagctcatgagaaaggggtcctacaaccctgtcacccacatctacacagcacaggatgtgaaggaggtcattgaatacgcacggctccggggtatccgtgtgcttgcagagtttgacactcctggccacactttgtcctggggaccaggtatccctggattactgactccttgctaccctgggtctgagccctctggcacctttggaccagtgaatcccagtctcaataatacctatgagttcatgagcacattcttcttagaagtcagctctgtcttcccagatttttatcttcatcttggaggagatgaggttgatttcacctgctggaagtccaacccagagatccaggactttatgaggaagaaaggcttcggtgaggacttcaagcagctggagtccttctacatccagacgctgctggacatcgtctcttcttatggcaagggctatgtggtgtggcaggaggtgtttgataataaagtaaagattcagccagacacaatcatacaggtgtggcgagaggatattccagtgaactatatgaaggagctggaactggtcaccaaggccggcttccgggcccttctctctgccccctggtacctgaaccgtatatcctatggccctgactggaaggatttctacgtagtggaacccctggcatttgaaggtacccctgagcagaaggctctggtgattggtggagaggcttgtatgtggggagaatatgtggacaacacaaacctggtccccaggctctggcccagagcaggggctgttgccgaaaggctgtggagcaacaagttgacatctgacctgacatttgcctatgaacgtttgtcacacttccgctgtgagttgctgaggcgaggtgtccaggcccaacccctcaatgtaggcttctgtgagcaggagtttgaacagacctgcccaactttcttgtacaaagttggcattataagaaagcattgcttatcaatttgttgcaacgaac

SEQ ID NO: 370 - protein, 529 aa, Artificial Sequence
  Synthetic
MTSSRLWFSLLLAAAFAGRATALWPWPQNFQTSDQRYVLYPNNFQFQYDVSSAAQPGCSVLDEAFQRYRDLLFGSGSWPRPYLTGKRHTLEKNVLVVSVVTPGCNQLPTLESVENYTLTINDDQCLLLSETVWGALRGLETFSQLVWKSAEGTFFINKTEIEDFPRFPHRGLLLDTSRHYLPLSSILDTLDVMAYNKLNVFHWHLVDDPSFPYESFTFPELMRKGSYNPVTHIYTAQDVKEVIEYARLRGIRVLAEFDTPGHTLSWGPGIPGLLTPCYPGSEPSGTFGPVNPSLNNTYEFMSTFFLEVSSVFPDFYLHLGGDEVDFTCWKSNPEIQDFMRKKGFGEDFKQLESFYIQTLLDIVSSYGKGYVVWQEVFDNKVKIQPDTIIQVWREDIPVNYMKELELVTKAGFRALLSAPWYLNRISYGPDWKDFYVVEPLAFEGTPEQKALVIGGEACMWGEYVDNTNLVPRLWPRAGAVAERLWSNKLTSDLTFAYERLSHFRCELLRRGVQAQPLNVGFCEQEFEQT

SEQ ID NO: 371 - DNA, 25 bp, Artificial Sequence
  Synthetic
  misc_feature (1)..(5): n is a, c, g, or t
nnnnntcatcctgataaactgcaaa

SEQ ID NO: 372 - DNA, 82 bp, Artificial Sequence
  Synthetic
  misc_feature (1)..(5): n is a, c, g, or t
nnnnncagtttgtacggatgactgatgagtcccaaataggacgaaacgcgcttcggtgcgtctcatcctgataaactgcaaa

SEQ ID NO: 373 - DNA, 333 bp, Artificial Sequence
  Synthetic
acctgaaccgtatatcgacgcaccgaagcgcgtttcgtcctatttgggactcatcaggatatacggttcaggtgatatacggttcaggtgacgcaccgaagcgcgtttcgtcctatttgggactcatcagacctgaaccgtatatcatccttccagtcagggccatgtttgagagctagaaatagcaagtttaaataaggctagtccgttatcaacttgaaaaagtgggaccgagtcggtccacctgaaccgtatatcgacgcaccgaagcgcgtttcgtcctatttgggactcatcaggatatacggttcaggtctatggccctgactggaa

SEQ ID NO: 374 - DNA, 34 bp, Artificial Sequence
  Synthetic
cctgggtcaatccttggggcccagactgagcacg

SEQ ID NO: 375 - DNA, 51 bp, Artificial Sequence
  Synthetic
cctgggtcaatccttggggcccagactgagcacgtgatggcagaggaaagg

SEQ ID NO: 376 - DNA, 51 bp, Artificial Sequence
  Synthetic
cctttcctctgccatcacgtgctcagtctgggccccaaggattgacccagg

SEQ ID NO: 377 - DNA, 17 bp, Artificial Sequence
  Synthetic
tgatggcagaggaaagg

SEQ ID NO: 378 - DNA, 23 bp, Artificial Sequence
  Synthetic
gcaggctttaaaggaaccaattc

SEQ ID NO: 379 - DNA, 43 bp, Artificial Sequence
  Synthetic
gcaggctttaaaggaaccaattccctgggtcaatccttggggc

SEQ ID NO: 380 - DNA, 20 bp, Artificial Sequence
  Synthetic
ctctggaggatctagcggag

SEQ ID NO: 381 - DNA, 40 bp, Artificial Sequence
  Synthetic
ctctggaggatctagcggagtttttttttttttttttttt

SEQ ID NO: 382 - DNA, 34 bp, Artificial Sequence
  Synthetic
ctctggaggatctagcggagcccccccccccccc

SEQ ID NO: 383 - DNA, 20 bp, Artificial Sequence
  Synthetic
ggcccagactgagcacgtga

SEQ ID NO: 384 - DNA, 20 bp, Artificial Sequence
  Synthetic
ggcccagactgagcacgtga

SEQ ID NO: 385 - DNA, 20 bp, Artificial Sequence
  Synthetic
ggcccagactgagcacgtga

SEQ ID NO: 386 - DNA, 20 bp, Artificial Sequence
  Synthetic
ggcccagactgagcacgtga

SEQ ID NO: 387 - DNA, 20 bp, Artificial Sequence
  Synthetic
ggcccagactgagcacgtga

SEQ ID NO: 388 - DNA, 20 bp, Artificial Sequence
  Synthetic
ggcccagactgagcacgtga

SEQ ID NO: 389 - DNA, 20 bp, Artificial Sequence
  Synthetic
ggcccagactgagcacgtga

SEQ ID NO: 390 - DNA, 20 bp, Artificial Sequence
  Synthetic
ggcccagactgagcacgtga

SEQ ID NO: 391 - DNA, 20 bp, Artificial Sequence
  Synthetic
ggcccagactgagcacgtga

SEQ ID NO: 392 - DNA, 20 bp, Artificial Sequence
  Synthetic
ggcccagactgagcacgtga

SEQ ID NO: 393 - DNA, 20 bp, Artificial Sequence
  Synthetic
ggcccagactgagcacgtga

SEQ ID NO: 394 - DNA, 23 bp, Artificial Sequence
  Synthetic
tctgctatcacgtgctcagtctg

SEQ ID NO: 395 - DNA, 20 bp, Artificial Sequence
  Synthetic
gcacatactagcccctgtct

SEQ ID NO: 396 - protein, 15 aa, Artificial Sequence
  Synthetic
QYIKANSKFIGITEL

SEQ ID NO: 397 - DNA, 45 bp, Artificial Sequence
  Synthetic
catgatataaaagcaaattctaaatttataggtataactgaacta

SEQ ID NO: 398 - protein, 535 aa, Artificial Sequence
  Synthetic
GADDVVDSSKSFVMENFSSYHGTKPGYVDSIQKGIQKPKSGTQGNYDDDWKEFYSTDNKYDAAGYSVDNENPLSGKAGGVVKVTYPGLTKVLALKVDNAETIKKELGLSLTEPLMEQVGTEEFIKRFGDGASRVVLSLPFAEGSSSVEYINNWEQAKALSVELEINFETRGKRGQDAMYEYMAQACAGNRVRRSVGSSLSCINLDWDVIRDKTKTKIESLKEHGPIKNKMSESPNKTVSEEKAKQYLEEFHQTALEHPELSELKTVTGTNPVFAGANYAAWAVNVAQVIDSETADNLEKTTAALSILPGIGSVMGIADGAVHHNTEEIVAQSIALSSLMVAQAIPLVGELVDIGFAAYNFVESIINLFQVVHNSYNRPAYSPGHKTQPFLHDGYAVSWNTVEDSIIRTGFQGESGHDIKITAENTPLPIAGVLLPTIPGKLDVNKSKTHISVNGRKIRMRCRAIDGDVTFCRPKSPVYVGNGVHANLHVAFHRSSSEKIHSNEISSDSIGVLGYQKTVDHTKVNSKLSLFFEIKS

SEQ ID NO: 399 - DNA, 1605 bp, Artificial Sequence
  Synthetic
ggcgccgacgacgtggtggacagcagcaagagcttcgtgatggagaacttcagcagctaccacggcaccaagcccggctacgtggacagcatccagaagggcatccagaagcccaagagcggcacccagggcaactacgacgacgactggaaggagttctacagcaccgacaacaagtacgacgccgccggctacagcgtggacaacgagaaccccctgagcggcaaggccggcggcgtggtgaaggtgacctaccccggcctgaccaaggtgctggccctgaaggtggacaacgccgagaccatcaagaaggagctgggcctgagcctgaccgagcccctgatggagcaggtgggcaccgaggagttcatcaagaggttcggcgacggcgccagcagggtggtgctgagcctgcccttcgccgagggcagcagcagcgtggagtacatcaacaactgggagcaggccaaggccctgagcgtggagctggagatcaacttcgagaccaggggcaagaggggccaggacgccatgtacgagtacatggcccaggcctgcgccggcaacagggtgaggaggagcgtgggcagcagcctgagctgcatcaacctggactgggacgtgatcagggacaagaccaagaccaagatcgagagcctgaaggagcacggccccatcaagaacaagatgagcgagagccccaacaagaccgtgagcgaggagaaggccaagcagtacctggaggagttccaccagaccgccctggagcaccccgagctgagcgagctgaagaccgtgaccggcaccaaccccgtgttcgccggcgccaactacgccgcctgggccgtgaacgtggcccaggtgatcgacagcgagaccgccgacaacctggagaagaccaccgccgccctgagcatcctgcccggcatcggcagcgtgatgggcatcgccgacggcgccgtgcaccacaacaccgaggagatcgtggcccagagcatcgccctgagcagcctgatggtggcccaggccatccccctggtgggcgagctggtggacatcggcttcgccgcctacaacttcgtggagagcatcatcaacctgttccaggtggtgcacaacagctacaacaggcccgcctacagccccggccacaagacccagcccttcctgcacgacggctacgccgtgagctggaacaccgtggaggacagcatcatcaggaccggcttccagggcgagagcggccacgacatcaagatcaccgccgagaacacccccctgcccatcgccggcgtgctgctgcccaccatccccggcaagctggacgtgaacaagagcaagacccacatcagcgtgaacggcaggaagatcaggatgaggtgcagggccatcgacggcgacgtgaccttctgcaggcccaagagccccgtgtacgtgggcaacggcgtgcacgccaacctgcacgtggccttccacaggagcagcagcgagaagatccacagcaacgagatcagcagcgacagcatcggcgtgctgggctaccagaagaccgtggaccacaccaaggtgaacagcaagctgagcctgttcttcgagatcaagagc

SEQ ID NO: 400 - protein, 15 aa, Artificial Sequence
  Synthetic
GTYRLIPNARANLTA

SEQ ID NO: 401 - DNA, 45 bp, Artificial Sequence
  Synthetic
ggcacctacaggctgatccccaacgccagggccaacctgaccgcc

SEQ ID NO: 402 - protein, 21 aa, Artificial Sequence
  Synthetic
PSKFFTISDSATFAPGPVSNA

SEQ ID NO: 403 - DNA, 63 bp, Artificial Sequence
  Synthetic
ccgagcaaattttttaccattagcgatagcgcgacctttgcgccgggcccggtgagcaacgcg

SEQ ID NO: 404 - protein, 21 aa, Artificial Sequence
  Synthetic
PSKLFIMLDNATFAPGPVVNA

SEQ ID NO: 405 - DNA, 63 bp, Artificial Sequence
  Synthetic
ccgagcaaactgtttattatgctggataacgcgacctttgcgccgggcccggtggtgaacgcg

SEQ ID NO: 406 - protein, 27 aa, Artificial Sequence
  Synthetic
TPPPYQVSCGGESDRASARVIDPAAQS

SEQ ID NO: 407 - DNA, 81 bp, Artificial Sequence
  Synthetic
accccccccccctaccaggtgagctgcggcggcgagagcgacagggccagcgccagggtgatcgaccccgccgcccagagc

SEQ ID NO: 408 - protein, 134 aa, Artificial Sequence
  Synthetic
PEYAYKIVKNKKMEDGFLQGMVDGWYGHHSNEQGSGLMENERTLDKANPNNDLCSWSDHEASSNNTNQEDLLQRESRRKKRIGTSTLNQRGNCNTKCQTEEARLKREEVSLVKSDQCSNGSLQCRANNSTEQVD

SEQ ID NO: 409 - DNA, 402 bp, Artificial Sequence
  Synthetic
cccgagtacgcctacaagatcgtgaagaacaagaagatggaggacggcttcctgcagggcatggtggacggctggtacggccaccacagcaacgagcagggcagcggcctgatggagaacgagaggaccctggacaaggccaaccccaacaacgacctgtgcagctggagcgaccacgaggccagcagcaacaacaccaaccaggaggacctgctgcagagggagagcaggaggaagaagaggatcggcaccagcaccctgaaccagaggggcaactgcaacaccaagtgccagaccgaggaggccaggctgaagagggaggaggtgagcctggtgaagagcgaccagtgcagcaacggcagcctgcagtgcagggccaacaacagcaccgagcaggtggac

SEQ ID NO: 410 - protein, 154 aa, Artificial Sequence
  Synthetic
TKSTNSRSGGISGPDNEAPVGEAPSPYGDNPRPNDGNNIRIGSKGYNGIITDTIEESCSCYPDAKVVKSVELDSTIWTSGSSPNQKIITIGWDPNGWTGTPMSPNGAYGTDGPSNGQANQHQAESISAGNSSLCPIRDNWHGSNRSWSWPDGAE

SEQ ID NO: 411 - DNA, 462 bp, Artificial Sequence
  Synthetic
accaagagcaccaacagcaggagcggcggcatcagcggccccgacaacgaggcccccgtgggcgaggcccccagcccctacggcgacaaccccaggcccaacgacggcaacaacatcaggatcggcagcaagggctacaacggcatcatcaccgacaccatcgaggagagctgcagctgctaccccgacgccaaggtggtgaagagcgtggagctggacagcaccatctggaccagcggcagcagccccaaccagaagatcatcaccatcggctgggaccccaacggctggaccggcacccccatgagccccaacggcgcctacggcaccgacggccccagcaacggccaggccaaccagcaccaggccgagagcatcagcgccggcaacagcagcctgtgccccatcagggacaactggcacggcagcaacaggagctggagctggcccgacggcgccgag

SEQ ID NO: 412 - protein, 45 aa, Artificial Sequence
  Synthetic
EKIVLLLAMMEKIVLLLAKCQTPMGAIKAVDGVTNKCPYLGSPSF

SEQ ID NO: 413 - DNA, 135 bp, Artificial Sequence
  Synthetic
gagaagatcgtgctgctgctggccatgatggagaagatcgtgctgctgctggccaagtgccagacccccatgggcgccatcaaggccgtggacggcgtgaccaacaagtgcccctacctgggcagccccagcttc

SEQ ID NO: 414 - protein, 36 aa, Artificial Sequence
  Synthetic
IRPCFWVELNPNQKIITIRPCFWVELICYPDAGEIT

SEQ ID NO: 415 - DNA, 108 bp, Artificial Sequence
  Synthetic
atcaggccctgcttctgggtggagctgaaccccaaccagaagatcatcaccatcaggccctgcttctgggtggagctgatctgctaccccgacgccggcgagatcacc

SEQ ID NO: 416 - protein, 45 aa, Artificial Sequence
  Synthetic
MEKIVLLLAEKIVLLLAMCPYLGSPSFKCQTPMGAIKAVDGVTNK

SEQ ID NO: 417 - DNA, 135 bp, Artificial Sequence
  Synthetic
atggagaagatcgtgctgctgctggccgagaagatcgtgctgctgctggccatgtgcccctacctgggcagccccagcttcaagtgccagacccccatgggcgccatcaaggccgtggacggcgtgaccaacaag

SEQ ID NO: 418 - protein, 36 aa, Artificial Sequence
  Synthetic
NPNQKIITICYPDAGEITIRPCFWVELRPCFWVELI

SEQ ID NO: 419 - DNA, 108 bp, Artificial Sequence
  Synthetic
aaccccaaccagaagatcatcaccatctgctaccccgacgccggcgagatcaccatcaggccctgcttctgggtggagctgaggccctgcttctgggtggagctgatc

SEQ ID NO: 420 - protein, 18 aa, Artificial Sequence
  Synthetic
MVSLVKSDQIGTSTLNQR

SEQ ID NO: 421 - DNA, 54 bp, Artificial Sequence
  Synthetic
atggtgagcctggtgaagagcgaccagatcggcaccagcaccctgaaccagagg

SEQ ID NO: 422 - protein, 9 aa, Artificial Sequence
  Synthetic
YNGIITDTI

SEQ ID NO: 423 - DNA, 27 bp, Artificial Sequence
  Synthetic
tacaacggcatcatcaccgacaccatc

SEQ ID NO: 424 - protein, 63 aa, Artificial Sequence
  Synthetic
MEKIVLLLAEKIVLLLAMMVSLVKSDQCPYLGSPSFIGTSTLNQRKCQTPMGAIKAVDGVTNK

SEQ ID NO: 425 - DNA, 135 bp, Artificial Sequence
  Synthetic
atggagaagatcgtgctgctgctggccgagaagatcgtgctgctgctggccatgatggtgagcctggtgaagagcgaccagtgcccctacctgggcagccccagcttcatcggcaccagcaccctgaaccagagg

SEQ ID NO: 426 - protein, 45 aa, Artificial Sequence
  Synthetic
NPNQKIITIYNGIITDTICYPDAGEITIRPCFWVELRPCFWVELI

SEQ ID NO: 427 - DNA, 135 bp, Artificial Sequence
  Synthetic
aaccccaaccagaagatcatcaccatctacaacggcatcatcaccgacaccatctgctaccccgacgccggcgagatcaccatcaggccctgcttctgggtggagctgaggccctgcttctgggtggagctgatc

SEQ ID NO: 428 - protein, 535 aa, Artificial Sequence; identical to SEQ ID NO: 398
  Synthetic

SEQ ID NO: 429 - DNA, 27 bp, Artificial Sequence
  Synthetic
ggctaaccgtgccatttgatcaggtca

SEQ ID NO: 430 - DNA, 27 bp, Artificial Sequence
  Synthetic
ggctaaccgtgcaaattaacaaactaa

SEQ ID NO: 431 - DNA, 28 bp, Artificial Sequence
  Synthetic
ggccatctcgtgcaaattaacaaactaa

SEQ ID NO: 432 - DNA, 35 bp, Artificial Sequence
  Synthetic
ggtcctctgccatctcgtgcaaattaacaaactaa

SEQ ID NO: 433 - DNA, 42 bp, Artificial Sequence
  Synthetic
ggcttcctttcctctgccatctcgtgcaaattaacaaactaa

SEQ ID NO: 434 - DNA, 27 bp, Artificial Sequence
  Synthetic
ggctaaccgtgccatttgatcaggtca

SEQ ID NO: 435 - DNA, 27 bp, Artificial Sequence
  Synthetic
ggctaaccgtgcaaattaacaaactaa

SEQ ID NO: 436 - DNA, 28 bp, Artificial Sequence
  Synthetic
ggccatctcgtgcaaattaacaaactaa

SEQ ID NO: 437 - DNA, 35 bp, Artificial Sequence; identical to SEQ ID NO: 432
  Synthetic

SEQ ID NO: 438 - DNA, 42 bp, Artificial Sequence; identical to SEQ ID NO: 433
  Synthetic

SEQ ID NO: 439 - DNA, 17 bp, Artificial Sequence
  Synthetic
tctgccatctcgtgctc

SEQ ID NO: 440 - DNA, 17 bp, Artificial Sequence
  Synthetic
tctgccatctcgtgctc

SEQ ID NO: 441 - DNA, 18 bp, Artificial Sequence
  Synthetic
tctgccatcatcgtgctc

SEQ ID NO: 442 - DNA, 16 bp, Artificial Sequence
  Synthetic
tctgccatccgtgctc

SEQ ID NO: 443 - protein, 1517 aa, S. PYOGENES
MKRTADGSEFESPKKKRKVDKKYSIGLDIGTNSVGWAVITDEYKVPSKKFKVLGNTDRHSIKKNLIGALLFDSGETAEATRLKRTARRRYTRRKNRICYLQEIFSNEMAKVDDSFFHRLEESFLVEEDKKHERHPIFGNIVDEVAYHEKYPTIYHLRKKLVDSTDKADLRLIYLALAHMIKFRGHFLIEGDLNPDNSDVDKLFIQLVQTYNQLFEENPINASGVDAKAILSARLSKSRRLENLIAQLPGEKKNGLFGNLIALSLGLTPNFKSNFDLAEDAKLQLSKDTYDDDLDNLLAQIGDQYADLFLAAKNLSDAILLSDILRVNTEITKAPLSASMIKRYDEHHQDLTLLKALVRQQLPEKYKEIFFDQSKNGYAGYIDGGASQEEFYKFIKPILEKMDGTEELLVKLNREDLLRKQRTFDNGSIPHQIHLGELHAILRRQEDFYPFLKDNREKIEKILTFRIPYYVGPLARGNSRFAWMTRKSEETITPWNFEEVVDKGASAQSFIERMTNFDKNLPNEKVLPKHSLLYEYFTVYNELTKVKYVTEGMRKPAFLSGEQKKAIVDLLFKTNRKVTVKQLKEDYFKKIECFDSVEISGVEDRFNASLGTYHDLLKIIKDKDFLDNEENEDILEDIVLTLTLFEDREMIEERLKTYAHLFDDKVMKQLKRRRYTGWGRLSRKLINGIRDKQSGKTILDFLKSDGFANRNFMQLIHDDSLTFKEDIQKAQVSGQGDSLHEHIANLAGSPAIKKGILQTVKVVDELVKVMGRHKPENIVIEMARENQTTQKGQKNSRERMKRIEEGIKELGSQILKEHPVENTQLQNEKLYLYYLQNGRDMYVDQELDINRLSDYDVDAIVPQSFLKDDSIDNKVLTRSDKNRGKSDNVPSEEVVKKMKNYWRQLLNAKLITQRKFDNLTKAERGGLSELDKAGFIKRQLVETRQITKHVAQILDSRMNTKYDENDKLIREVKVITLKSKLVSDFRKDFQFYKVREINNYHHAHDAYLNAVVGTALIKKYPKLESEFVYGDYKVYDVRKMIAKSEQEIGKATAKYFFYSNIMNFFKTEITLANGEIRKRPLIETNGETGEIVWDKGRDFATVRKVLSMPQVNIVKKTEVQTGGFSKESILPKRNSDKLIARKKDWDPKKYGGFDSPTVAYSVLVVAKVEKGKSKKLKSVKELLGITIMERSSFEKNPIDFLEAKGYKEVKKDLIIKLPKYSLFELENGRKRMLASAGELQKGNELALPSKYVNFLYLASHYEKLKGSPEDNEQKQLFVEQHKHYLDEIIEQISEFSKRVILADANLDKVLSAYNKHRDKPIREQAENIIHLFTLTNLGAPAAFKYFDTTIDRKRYTSTKEVLDATLIHQSITGLYETRIDLSQLGGDSGGSSGGSCLSYETEILTVEYGLLPIGKIVEKRIECTVYSVDNNGNIYTQPVAQWHDRGEQEVFEYCLEDGSLIRATKDHKFMTVDGQMLPIDEIFERELDLMRVDNLPNSGGSKRTADGSEFEPKKKRKV

SEQ ID NO: 444 - skipped

SEQ ID NO: 445 - protein, 1367 aa, Artificial Sequence; identical to SEQ ID NO: 55
  Synthetic

SEQ ID NO: 446 - protein, 8 aa, Artificial Sequence
  Synthetic
SGGSSGGS

SEQ ID NO: 447 - protein, 106 aa, Artificial Sequence
  Synthetic
CLSYETEILTVEYGLLPIGKIVEKRIECTVYSVDNNGNIYTQPVAQWHDRGEQEVFEYCLEDGSLIRATKDHKFMTVDGQMLPIDEIFERELDLMRVDNLPNSGGS

SEQ ID NO: 448-449 - skipped (2 entries)

SEQ ID NO: 450 - protein, 696 aa, S. PYOGENES
NIEDEYRLHETSKEPDVSLGSTWLSDFPQAWAETGGMGLAVRQAPLIIPLKATSTPVSIKQYPMSQEARLGIKPHIQRLLDQGILVPCQSPWNTPLLPVKKPGTNDYRPVQDLREVNKRVEDIHPTVPNPYNLLSGLPPSHQWYTVLDLKDAFFCLRLHPTSQPLFAFEWRDPEMGISGQLTWTRLPQGFKNSPTLFDEALHRDLADFRIQHPDLILLQYVDDLLLAATSELDCQQGTRALLQTLGNLGYRASAKKAQICQKQVKYLGYLLKEGQRWLTEARKETVMGQPTPKTPRQLREFLGTAGFCRLWIPGFAEMAAPLYPLTKTGTLFNWGPDQQKAYQEIKQALLTAPALGLPDLTKPFELFVDEKQGYAKGVLTQKLGPWRRPVAYLSKKLDPVAAGWPPCLRMVAAIAVLTKDAGKLTMGQPLVILAPHAVEALVKQPPDRWLSNARMTHYQALLLDTDRVQFGPVVALNPATLLPLPEEGLQHNCLDILAEAHGTRPDLTDQPLPDADHTWYTDGSSLLQEGQRKAGAAVTTETEVIWAKALPAGTSAQRAELIALTQALKMAEGKKLNVYTDSRYAFATAHIHGEIYRRRGLLTSEGKEIKNKDEILALLKALFLPKRLSIIHCPGHQKGHSAEARGNRMADQAARKAAITETPDTSTLLIENSSPSGGSKRTADGSEFEPKKKRKV

SEQ ID NO: 451 - skipped

SEQ ID NO: 452 - protein, 35 aa, Artificial Sequence
  Synthetic
IKIATRKYLGKQNVYDIGVERDHNFALKNGFIASN

SEQ ID NO: 453 - protein, 28 aa, Artificial Sequence
  Synthetic
CFNSGSETPGTSESATPESSGGSSGGSS

SEQ ID NO: 454 - protein, 677 aa, Artificial Sequence; identical to SEQ ID NO: 89
  Synthetic

SEQ ID NO: 455 - DNA, 21 bp, Artificial Sequence
  Synthetic
gtgccatcacgtgctcagtct

SEQ ID NO: 456 - DNA, 21 bp, Artificial Sequence
  Synthetic
gagcgatccaggtgctgcaga

SEQ ID NO: 457 - DNA, 20 bp, Artificial Sequence
  Synthetic
ggagcccttcttcttctgct

SEQ ID NO: 458 - protein, 881 aa, S. AUREUS
MKRTADGSEFESPKKKRKVGKRNYILGLAIGITSVGYGIIDYETRDVIDAGVRLFKEANVENNEGRRSKRGARRLKRRRRHRIQRVKKLLFDYNLLTDHSELSGINPYEARVKGLSQKLSEEEFSAALLHLAKRRGVHNVNEVEEDTGNELSTKEQISRNSKALEEKYVAELQLERLKKDGEVRGSINRFKTSDYVKEAKQLLKVQKAYHQLDQSFIDTYIDLLETRRTYYEGPGEGSPFGWKDIKEWYEMLMGHCTYFPEELRSVKYAYNADLYNALNDLNNLVITRDENEKLEYYEKFQIIENVFKQKKKPTLKQIAKEILVNEEDIKGYRVTSTGKPEFTNLKVYHDIKDITARKEIIENAELLDQIAKILTIYQSSEDIQEELTNLNSELTQEEIEQISNLKGYTGTHNLSLKAINLILDELWHTNDNQIAIFNRLKLVPKKVDLSQQKEIPTTLVDDFILSPVVKRSFIQSIKVINAIIKKYGLPNDIIIELAREKNSKDAQKMINEMQKRNRQTNERIEEIIRTTGKENAKYLIEKIKLHDMQEGKCLYSLEAIPLEDLLNNPFNYEVDHIIPRSVSFDNSFNNKVLVKQEENSKKGNRTPFQYLSSSDSKISYETFKKHILNLAKGKGRISKTKKEYLLEERDINRFSVQKDFINRNLVDTRYATRGLMNLLRSYFRVNNLDVKVKSINGGFTSFLRRKWKFKKERNKGYKHHAEDALIIANADFIFKEWKKLDKAKKVMENQMFEEKQAECLSYETEILTVEYGLLPIGKIVEKRIECTVYSVDNNGNIYTQPVAQWHDRGEQEVFEYCLEDGSLIRATKDHKFMTVDGQMLPIDEIFERELDLMRVDNLPNSGGSKRTADGSEFEPKKKRKV

SEQ ID NO: 459 - skipped

SEQ ID NO: 460 - protein, 739 aa, Artificial Sequence
  Synthetic
GKRNYILGLAIGITSVGYGIIDYETRDVIDAGVRLFKEANVENNEGRRSKRGARRLKRRRRHRIQRVKKLLFDYNLLTDHSELSGINPYEARVKGLSQKLSEEEFSAALLHLAKRRGVHNVNEVEEDTGNELSTKEQISRNSKALEEKYVAELQLERLKKDGEVRGSINRFKTSDYVKEAKQLLKVQKAYHQLDQSFIDTYIDLLETRRTYYEGPGEGSPFGWKDIKEWYEMLMGHCTYFPEELRSVKYAYNADLYNALNDLNNLVITRDENEKLEYYEKFQIIENVFKQKKKPTLKQIAKEILVNEEDIKGYRVTSTGKPEFTNLKVYHDIKDITARKEIIENAELLDQIAKILTIYQSSEDIQEELTNLNSELTQEEIEQISNLKGYTGTHNLSLKAINLILDELWHTNDNQIAIFNRLKLVPKKVDLSQQKEIPTTLVDDFILSPVVKRSFIQSIKVINAIIKKYGLPNDIIIELAREKNSKDAQKMINEMQKRNRQTNERIEEIIRTTGKENAKYLIEKIKLHDMQEGKCLYSLEAIPLEDLLNNPFNYEVDHIIPRSVSFDNSFNNKVLVKQEENSKKGNRTPFQYLSSSDSKISYETFKKHILNLAKGKGRISKTKKEYLLEERDINRFSVQKDFINRNLVDTRYATRGLMNLLRSYFRVNNLDVKVKSINGGFTSFLRRKWKFKKERNKGYKHHAEDALIIANADFIFKEWKKLDKAKKVMENQMFEEKQAE

SEQ ID NO: 461 - skipped

SEQ ID NO: 462 - protein, 102 aa, Artificial Sequence
  Synthetic
CLSYETEILTVEYGLLPIGKIVEKRIECTVYSVDNNGNIYTQPVAQWHDRGEQEVFEYCLEDGSLIRATKDHKFMTVDGQMLPIDEIFERELDLMRVDNLPN

SEQ ID NO: 463-464 - skipped (2 entries)

SEQ ID NO: 465 - protein, 1099 aa, S. AUREUS
MKRTADGSEFESPKKKRKVIKIATRKYLGKQNVYDIGVERDHNFALKNGFIASNCFNEIETEQEYKEIFITPHQIKHIKDFKDYKYSHRVDKKPNRKLINDTLYSTRKDDKGNTLIVNNLNGLYDKDNDKLKKLINKSPEKLLMYHHDPQTYQKLKLIMEQYGDEKNPLYKYYEETGNYLTKYSKKDNGPVIKKIKYYGNKLNAHLDITDDYPNSRNKVVKLSLKPYRFDVYLDNGVYKFVTVKNLDVIKKENYYEVNSKCYEEAKKLKKISNQAEFIASFYKNDLIKINGELYRVIGVNNDLLNRIEVNMIDITYREYLENMNDKRPPHIIKTIASKTQSIKKYSTDILGNLYEVKSKKHPQIIKKGSGGSSGGSSGSETPGTSESATPESSGGSSGGSSTLNIEDEYRLHETSKEPDVSLGSTWLSDFPQAWAETGGMGLAVRQAPLIIPLKATSTPVSIKQYPMSQEARLGIKPHIQRLLDQGILVPCQSPWNTPLLPVKKPGTNDYRPVQDLREVNKRVEDIHPTVPNPYNLLSGLPPSHQWYTVLDLKDAFFCLRLHPTSQPLFAFEWRDPEMGISGQLTWTRLPQGFKNSPTLFDEALHRDLADFRIQHPDLILLQYVDDLLLAATSELDCQQGTRALLQTLGNLGYRASAKKAQICQKQVKYLGYLLKEGQRWLTEARKETVMGQPTPKTPRQLREFLGTAGFCRLWIPGFAEMAAPLYPLTKTGTLFNWGPDQQKAYQEIKQALLTAPALGLPDLTKPFELFVDEKQGYAKGVLTQKLGPWRRPVAYLSKKLDPVAAGWPPCLRMVAAIAVLTKDAGKLTMGQPLVILAPHAVEALVKQPPDRWLSNARMTHYQALLLDTDRVQFGPVVALNPATLLPLPEEGLQHNCLDILAEAHGTRPDLTDQPLPDADHTWYTDGSSLLQEGQRKAGAAVTTETEVIWAKALPAGTSAQRAELIALTQALKMAEGKKLNVYTDSRYAFATAHIHGEIYRRRGLLTSEGKEIKNKDEILALLKALFLPKRLSIIHCPGHQKGHSAEARGNRMADQAARKAAITETPDTSTLLIENSSPSGGSKRTADGSEFEPKKKRKV

SEQ ID NO: 466 - skipped

SEQ ID NO: 467 - protein, 310 aa, Artificial Sequence
  Synthetic
IETEQEYKEIFITPHQIKHIKDFKDYKYSHRVDKKPNRKLINDTLYSTRKDDKGNTLIVNNLNGLYDKDNDKLKKLINKSPEKLLMYHHDPQTYQKLKLIMEQYGDEKNPLYKYYEETGNYLTKYSKKDNGPVIKKIKYYGNKLNAHLDITDDYPNSRNKVVKLSLKPYRFDVYLDNGVYKFVTVKNLDVIKKENYYEVNSKCYEEAKKLKKISNQAEFIASFYKNDLIKINGELYRVIGVNNDLLNRIEVNMIDITYREYLENMNDKRPPHIIKTIASKTQSIKKYSTDILGNLYEVKSKKHPQIIKKG

SEQ ID NO: 468-470 - skipped (3 entries)

SEQ ID NO: 471 - protein, 677 aa, Artificial Sequence; identical to SEQ ID NO: 89
  Synthetic

SEQ ID NO: 472 - protein, 413 aa, Artificial Sequence; identical to SEQ ID NO: 8
  Synthetic

SEQ ID NO: 473 - protein, 413 aa, Artificial Sequence; identical to SEQ ID NO: 9
  Synthetic

SEQ ID NO: 474 - protein, 413 aa, Artificial Sequence; identical to SEQ ID NO: 10
  Synthetic

SEQ ID NO: 475 - protein, 413 aa, Artificial Sequence; identical to SEQ ID NO: 11
  Synthetic

SEQ ID NO: 476 - protein, 413 aa, Artificial Sequence; identical to SEQ ID NO: 12
  Synthetic

SEQ ID NO: 477 - protein, 413 aa, Artificial Sequence; identical to SEQ ID NO: 13
  Synthetic

SEQ ID NO: 478 - protein, 413 aa, Artificial Sequence; identical to SEQ ID NO: 14
  Synthetic

SEQ ID NO: 479 - protein, 413 aa, Artificial Sequence; identical to SEQ ID NO: 15
  Synthetic

SEQ ID NO: 480-481 - skipped (2 entries)

SEQ ID NO: 482 - protein, 1053 aa, Staphylococcus aureus; identical to SEQ ID NO: 28

SEQ ID NO: 483 - protein, 1082 aa, N. meningitidis; identical to SEQ ID NO: 59

SEQ ID NO: 484 - protein, 984 aa, C. jejuni; identical to SEQ ID NO: 60

SEQ ID NO: 485 - protein, 1087 aa, G. stearothermophilus; identical to SEQ ID NO: 61

SEQ ID NO: 486 - protein, 1228 aa, Unknown; identical to SEQ ID NO: 62
  L. bacterium

SEQ ID NO: 487 - protein, 1108 aa, B. hisashii; identical to SEQ ID NO: 63

SEQ ID NO: 488 - protein, 108 aa, Artificial Sequence
  Synthetic
MGVQVETISPGDGRTFPKRGQTCVVHYTGMLEDGKKFDSSRDRNKPFKFMLGKQEVIRGWEEGVAQMSVGQRAKLTISPDYAYGATGHPGIIPPHATLVFDVELLKLE

SEQ ID NO: 489 - protein, 108 aa, Artificial Sequence
  Synthetic
MGVQVETISPGDGRTFPKRGQTCVVHYTGMLEDGKKVDSSRDRNKPFKFMLGKQEVIRGWEEGVAQMSVGQRAKLTISPDYAYGATGHPGIIPPHATLVFDVELLKLE

SEQ ID NO: 490 - protein, 165 aa, Artificial Sequence
  Synthetic
MVNPTVFFDIAVDGEPLGRVSFELFADKVPKTAENFRALSTGEKGFGYKGSCFHRIIPGFMCQGGDFTRHNGTGGKSIYGEKFEDENFILKHTGPGILSMANAGPNTNGSQFFICTAKTEWLDGKHVVFGKVKEGMNIVEAMERFGSRNGKTSKKITIADCGQLE

SEQ ID NO: 491 - protein, 108 aa, Artificial Sequence; identical to SEQ ID NO: 488
  Synthetic

SEQ ID NO: 492 - skipped

SEQ ID NO: 493 - protein, 216 aa, Homo sapiens
MLRLSERNMKVLLAAALIAGSVFFLLLPGPSAADEKKKGPKVTVKVYFDLRIGDEDVGRVIFGLFGKTVPKTVDNFVALATGEKGFGYKNSKFHRVIKDFMIQGGDFTRGDGTGGKSIYGERFPDENFKLKHYGPGWVSMANAGKDTNGSQFFITTVKTAWLDGKHVVFGKVLEGMEVVRKVESTKTDSRDKPLKDVIIADCGKIEVEKPFAIAKE

SEQ ID NO: 494 - protein, 212 aa, murine cyclophilin
MSPGPRLLLPAVLCLGLGALVSSSGSSGVRKRGPSVTDKVFFDVRIGDKDVGRIVIGLFGNVVPKTVENFVALATGEKGYGYKGSIFHRVIKDFMIQGGDFTARDGTGGMSIYGETFPDENFKLKHYGIGWVSMANAGPDTNGSQFFITLTKPTWLDGKHVVFGKVLDGMTVVHSIELQATDGHDRPLTDCTIVNSGKIDVKTPFVVEVPDW

SEQ ID NO: 495 - protein, 108 aa, Artificial Sequence; identical to SEQ ID NO: 489
  Synthetic

SEQ ID NO: 496 - protein, 187 aa, Homo sapiens
MVGSLNCIVAVSQNMGIGKNGDLPWPPLRNEFRYFQRMTTTSSVEGKQNLVIMGKKTWFSIPEKNRPLKGRINLVLSRELKEPPQGAHFLSRSLDDALKLTEQPELANKVDMVWIVGGSSVYKEAMNHPGHLKLFVTRIMQDFESDTFFPEIDLEKYKLLPEYPGVLSDVQEEKGIKYKFEVYEKND

SEQ ID NO: 497 - protein, 159 aa, E. coli [sequence omitted]

SEQ ID NO: 498 - protein, 777 aa, Homo sapiens
MDSKESLTPGREENPSSVLAQERGDVMDFYKTLRGGATVKVSASSPSLAVASQSDSKQRRLLVDFPKGSVSNAQQPDLSKAVSLSMGLYMGETETKVMGNDLGFPQQGQISLSSGETDLKLLEESIANLNRSTSVPENPKSSASTAVSAAPTEKEFPKTHSDVSSEQQHLKGQTGTNGGNVKLYTTDQSTFDILQDLEFSSGSPGKETNESPWRSDLLIDENCLLSPLAGEDDSFLLEGNSNEDCKPLILPDTKPKIKDNGDLVLSSPSNVTLPQVKTEKEDFIELCTPGVIKQEKLGTVYCQASFPGANIIGNKMSAISVHGVSTSGGQMYHYDMNTASLSQQQDQKPIFNVIPPIPVGSENWNRCQGSGDDNLTSLGTLNFPGRTVFSNGYSSPSMRPDVSSPPSSSSTATTGPPPKLCLVCSDEASGCHYGVLTCGSCKVFFKRAVEGQHNYLCAGRNDCIIDKIRRKNCPACRYRKCLQAGMNLEARKTKKKIKGIQQATTGVSQETSENPGNKTIVPATLPQLTPTLVSLLEVIEPEVLYAGYDSSVPDSTWRIMTTLNMLGGRQVIAAVKWAKAIPGFRNLHLDDQMTLLQYSWMFLMAFALGWRSYRQSSANLLCFAPDLIINEQRMTLPCMYDQCKHMLYVSSELHRLQVSYEEYLCMKTLLLLSSVPKDGLKSQELFDEIRMTYIKELGKAIVKREGNSSQNWQRFYQLTKLLDSMHEVVENLLNYCFQTFLDKTMSIEFPEMLAEIITNQIPKYSNGNIKKLLFHQK

SEQ ID NO: 499 - RNA, 452 nt, Artificial Sequence
  Synthetic
cacgguaggcacuguuaggaguuuuagagcuagaaauagcaaguuaaaauaaggcuaguccguuaucaacuugaaaaaguggcaccgagucggugcuugccucgguccaauccuuccggagugcagguggaaaccaucuccccaggagacgggcgcaccuuccccaagcgcggccagaccugcguggugcacuacaccgggaugcuugaagauggaaagaaauuugauuccucccgggacagaaacaagcccuuuaaguuuaugcuaggcaagcaggaggugauccgaggcugggaagaagggguugcccagaugagugugggucagagagccaaacugacuauaucuccagauuaugccuauggugccacugggcacccaggcaucaucccaccacaugccacucucgucuucgauguggagcuucuaaaacuggaauaacagugccuacc

SEQ ID NO: 500 - DNA, 464 bp, Artificial Sequence
  Synthetic
ggcccagactgagcacgtgagttttagagctagaaatagcaagttaaaataaggctagtccgttatcaacttgaaaaagtggcaccgagtcggtgctggaggaagcagggcttcctttcctctgccatcattccagttttagaagctccacatcgaagacgagagtggcatgtggtgggatgatgcctgggtgcccagtggcaccataggcataatctggagatatagtcagtttggctctctgacccacactcatctgggcaaccccttcttcccagcctcggatcacctcctgcttgcctagcataaacttaaagggcttgtttctgtcccgggaggaatcaaatttctttccatcttcaagcatcccggtgtagtgcaccacgcaggtctggccgcgcttggggaaggtgcgcccgtctcctggggagatggtttccacctgcactcccgtgctcagtctg

SEQ ID NO: 501 - DNA, 905 bp, Artificial Sequence; identical to SEQ ID NO: 223
  Synthetic

SEQ ID NO: 502 - DNA, 942 bp, Artificial Sequence; identical to SEQ ID NO: 224
  Synthetic

SEQ ID NO: 503 - DNA, 1370 bp, Artificial Sequence; identical to SEQ ID NO: 225
  Synthetic

SEQ ID NO: 504 - DNA, 807 bp, Artificial Sequence; identical to SEQ ID NO: 226
  Synthetic

SEQ ID NO: 505 - DNA, 743 bp, Artificial Sequence; identical to SEQ ID NO: 227
  Synthetic

SEQ ID NO: 506 - DNA, 20 bp, Artificial Sequence
  Synthetic
ggcccagactgagcacgtga

SEQ ID NO: 507 - DNA, 20 bp, Artificial Sequence
  Synthetic
ggcccagactgagcacgtga

SEQ ID NO: 508 - DNA, 20 bp, Artificial Sequence
  Synthetic
ggcccagactgagcacgtga

SEQ ID NO: 509 - DNA, 20 bp, Artificial Sequence
  Synthetic
ggcccagactgagcacgtga

SEQ ID NO: 510 - DNA, 20 bp, Artificial Sequence
  Synthetic
ggcccagactgagcacgtga

SEQ ID NO: 511 - DNA, 20 bp, Artificial Sequence
  Synthetic
ggcactgcggctggaggtgg

SEQ ID NO: 512 - DNA, 20 bp, Artificial Sequence
  Synthetic
gagtccgagcagaagaagaa

SEQ ID NO: 513 - DNA, 20 bp, Artificial Sequence
  Synthetic
ggaatcccttctgcagcacc

SEQ ID NO: 514 - protein, 1803 aa, Artificial Sequence; identical to SEQ ID NO: 162
  Synthetic

SEQ ID NO: 515 - protein, 2117 aa, Artificial Sequence; identical to SEQ ID NO: 163
  Synthetic

SEQ ID NO: 516 - protein, 2117 aa, Artificial Sequence; identical to SEQ ID NO: 164
  Synthetic

SEQ ID NO: 517 - DNA, 34 bp, Artificial Sequence
  Synthetic
ataacttcgtatagcatacattatacgaagttat

SEQ ID NO: 518 - DNA, 32 bp, Artificial Sequence
  Synthetic
taactttaaataatgccaattatttaaagtta

SEQ ID NO: 519 - DNA, 34 bp, Artificial Sequence
  Synthetic
tcaatttctgagaactgtcattctcggaaattga

SEQ ID NO: 520 - DNA, 34 bp, Artificial Sequence
  Synthetic
ctcgtgtccgataactgtaattatcggacatgat

SEQ ID NO: 521 - DNA, 34 bp, Artificial Sequence
  Synthetic
gaagttcctattctctagaaagtataggaacttc

SEQ ID NO: 522 - DNA, 39 bp, Artificial Sequence
  Synthetic
gagtttcattaaggaataactaattccctaatgaaactc

SEQ ID NO: 523 - DNA, 33 bp, Artificial Sequence
  Synthetic
ggttgcttaagaataagtaattcttaagcaacc

SEQ ID NO: 524 - DNA, 43 bp, Artificial Sequence
  Synthetic
acgaaaaatggtaaggaatagaccattccttaccatttttggt

SEQ ID NO: 525 - DNA, 31 bp, Artificial Sequence
  Synthetic
ttgatgaaagaataacgtattctttcatcaa

SEQ ID NO: 526 - DNA, 33 bp, Artificial Sequence
  Synthetic
gtgcgtcaaataataacgtattatttgacactt

SEQ ID NO: 527 - DNA, 34 bp, Artificial Sequence
  Synthetic
aataggtctgagaacgcccattctcagacgtatt

SEQ ID NO: 528 - DNA, 34 bp, Artificial Sequence
  Synthetic
tgaatgtcctataattacacttataggacattca

SEQ ID NO: 529 - DNA, 34 bp, Artificial Sequence
  Synthetic
gaaactttaaataataagtcttatttaaagtttc

SEQ ID NO: 530 - DNA, 61 bp, Artificial Sequence
  Synthetic
aaacgatatcagacatttgtctgataatgcttcattatcagacaaatgtctgatatcgttt

SEQ ID NO: 531 - DNA, 34 bp, Artificial Sequence
  Synthetic
atatatacgtatatagacatatatacgtatatat

SEQ ID NO: 532 - DNA, 34 bp, Artificial Sequence
  Synthetic
ataactctatataatgtatgctatatagagttat

SEQ ID NO: 533 - DNA, 34 bp, Artificial Sequence
  Synthetic
acaacatcctattacaccctatatgccaacatgg

SEQ ID NO: 534 - DNA, 34 bp, Artificial Sequence
  Synthetic
aacccactgcttaagcctcaataaagcttgcctt

SEQ ID NO: 535 - DNA, 34 bp, Artificial Sequence
  Synthetic
gatacaacgtatatacctttctatacgttgttta

SEQ ID NO: 536 - DNA, 48 bp, Artificial Sequence
  Synthetic
ggtttgtctggtcaaccaccgcggtctcagtggtgtacggtacaaacc

SEQ ID NO: 537 - DNA, 38 bp, Artificial Sequence
  Synthetic
ggcttgtcgacgacggcggtctccgtcgtcaggatcat

SEQ ID NO: 538 - DNA, 42 bp, Artificial Sequence
  Synthetic
gtgccccaactggggtaacctttgagttctctcagttggggg

SEQ ID NO: 539 - DNA, 45 bp, Artificial Sequence
  Synthetic
tgcgggtgccagggcgtgcccttgggctccccgggcgcgtactcc

SEQ ID NO: 540 - DNA, 50 bp, Artificial Sequence
  Synthetic
tgttccccaaagcgataccacttgaagcagtggtactgcttgtgggtaca

SEQ ID NO: 541 - DNA, 64 bp, Artificial Sequence
  Synthetic
gcatgttccccaaagcgataccacttgaagcagtggtactgcttgtgggtacactctgcgggtg

SEQ ID NO: 542 - DNA, 52 bp, Artificial Sequence
  Synthetic
ggtgctgggttgttgtctctggacagtgatccatgggaaactactcagcacc

SEQ ID NO: 543 - DNA, 34 bp, Artificial Sequence
  Synthetic
caggtttttgacgaaagtgatccagatgatccag

SEQ ID NO: 544 - DNA, 54 bp, Artificial Sequence
  Synthetic
attttaggtatatgattttgtttattagtgtaaataacactatgtacctaaaat

SEQ ID NO: 545 - DNA, 42 bp, Artificial Sequence
  Synthetic
caaaggatcactgaatcaaaagtattgctcatccacgcgaaa

SEQ ID NO: 546 - DNA, 55 bp, Artificial Sequence
  Synthetic
tttgtgcggaactacgaacagttcattaatacgaagtgtacaaacttccatacaa

SEQ ID NO: 547 - DNA, 56 bp, Artificial Sequence
  Synthetic
cgaaaatgtatggaggcacttgtatcaatataggatgtataccttcgaagacactt

SEQ ID NO: 548 - DNA, 53 bp, Artificial Sequence
  Synthetic
gagtttttatttcgtttatttcaattaaggtaactaaaaaactccttttaagg

SEQ ID NO: 549 - DNA, 53 bp, Artificial Sequence
  Synthetic
atgccaacacaattaacatctcaatcaaggtaaatgctttttgctttttttgc

SEQ ID NO: 550 - DNA, 40 bp, Artificial Sequence
  Synthetic
ttcctcgttttctctcgttggaagaagaagaaacgagaaa

SEQ ID NO: 551 - DNA, 40 bp, Artificial Sequence
  Synthetic
tttcggatcaagctatgaaggacgcaaagagggaactaaa

SEQ ID NO: 552 - DNA, 40 bp, Artificial Sequence
  Synthetic
ttcctcgttttctctcgttggacggaaacgaatcgagaaa

SEQ ID NO: 553 - DNA, 40 bp, Artificial Sequence; identical to SEQ ID NO: 551
  Synthetic

SEQ ID NO: 554 - DNA, 52 bp, Artificial Sequence
  Synthetic
gtagtgtatctcacaggtccacggttggccgtggactgctgaagaacattcc

SEQ ID NO: 555 - DNA, 40 bp, Artificial Sequence
  Synthetic
gaaggtgttggtgcggggttggccgtggtcgaggtggggt

SEQ ID NO: 556 - DNA, 52 bp, Artificial Sequence
  Synthetic
aaaaaaatacagcgtttttcatgtacaactatactagttgtagtgcctaaaa

SEQ ID NO: 557 - DNA, 54 bp, Artificial Sequence
  Synthetic
ttgtaaaggagactgataatggcatgtacaactatactcgtcggtaaaaaggca

SEQ ID NO: 558 - DNA, 46 bp, Artificial Sequence
  Synthetic
tccagcccaacagtgttagtctttgctcttacccagttgggcggga

SEQ ID NO: 559 - DNA, 47 bp, Artificial Sequence
  Synthetic
gatcagctccgcgggcaagacctttctccttcacggggtggaaggtc

SEQ ID NO: 560 - DNA, 63 bp, Artificial Sequence
  Synthetic
ctagttttaaagttggttattagttactgtgatatttatcacggtacccaataaccaatgaat

SEQ ID NO: 561 - DNA, 71 bp, Artificial Sequence
  Synthetic
cggaaggtagcgtcaacgataggtgtaactgtcgtgtttgtaacggtacttccaacagctggcgccgccac

SEQ ID NO: 562 - DNA, 33 bp, Artificial Sequence
  Synthetic
caatgaaaaactaggcatgtagaagttgtttgt

SEQ ID NO: 563 - DNA, 32 bp, Artificial Sequence
  Synthetic
tttccacagacaactcacgtggaggtagtcac

SEQ ID NO: 564 - DNA, 56 bp, Artificial Sequence
  Synthetic
tgtagtaagtatcttaatatacagctttatctgttttttaagatacttactacttt

SEQ ID NO: 565 - DNA, 58 bp, Artificial Sequence
  Synthetic
cacccattgtgttcacaggagatacagctttatctgtactgatattaatgacatgctg

SEQ ID NO: 566 - DNA, 47 bp, Artificial Sequence
  Synthetic
agttgtggccatgtgtccatctgggggcagatggagacggggtcaca

SEQ ID NO: 567 - DNA, 50 bp, Artificial Sequence
  Synthetic
atctggatgtgggtgtccatctgcgggcagacgccgcagtcgaagcacgg

SEQ ID NO: 568 - DNA, 50 bp, Artificial Sequence
  Synthetic
accttgatctcggtgtccatcgccgggcagacgccgcagtcgaagcacgg

SEQ ID NO: 569 - DNA, 60 bp, Artificial Sequence
  Synthetic
ccctaatacgcaagtcgataactctcctgggagcgttgacaacttgcgcaccctgatctg

SEQ ID NO: 570 - DNA, 61 bp, Artificial Sequence
  Synthetic
gagcgccggatcagggagtggacggcctgggagcgctacacgctgtggctgcggtcggtgc

SEQ ID NO: 571 - DNA, 63 bp, Artificial Sequence
  Synthetic
gctcatgtatgtgtctacgcgagattctcgcccgagaacttctgcaaggcactgctcttggct

SEQ ID NO: 572 - DNA, 59 bp, Artificial Sequence
  Synthetic
ggacggcgcagaaggggagtagctcttcgccggaccgtcgacatactgctcagctcgtc

SEQ ID NO: 573 - DNA, 65 bp, Artificial Sequence
  Synthetic
atggataaaaaaatacagcgtttttcatgtacaactatactagttgtagtgcctaaataatgctt

SEQ ID NO: 574 - DNA, 62 bp, Artificial Sequence
  Synthetic
gtttgtaaaggagactgataatggcatgtacaactatactcgtcggtaaaaaggcatcttat

SEQ ID NO: 575 - DNA, 62 bp, Artificial Sequence
  Synthetic
aaaaattacaaagttttcaacccttgatttgaattagcggtcaaataatttgtaattcgttt

SEQ ID NO: 576 - DNA, 66 bp, Artificial Sequence
  Synthetic
ttccaaagagcgcccaacgcgacctgaaatttgaataagactgctgcttgtgtaaaggcgatgatt

SEQ ID NO: 577 - DNA, 66 bp, Artificial Sequence
  Synthetic
gtgttataaacctgtgtgagagttaagtttacatgcctaaccttaacttttacgcaggttcagctt

SEQ ID NO: 578 - DNA, 62 bp, Artificial Sequence
  Synthetic
agacgagaaacgttccgtccgtctgggtcagttgggcaaagttgatgaccgggtcgtccgtt

SEQ ID NO: 579 - DNA, 64 bp, Artificial Sequence
  Synthetic
ttaataaactatggaagtatgtacagtcttgcaatgttgagtgaacaaacttccataataaaat

SEQ ID NO: 580 - DNA, 65 bp, Artificial Sequence
  Synthetic
caatcatcagataactatggcggcacgtgcattaaccacggttgtatcccgtctaaagtactcgt

SEQ ID NO: 581 - DNA, 62 bp, Artificial Sequence
  Synthetic
gtggttgtttttgttggaagtgtgtatcaggtatctgcatagttattccgaacttccaatta

SEQ ID NO: 582 - DNA, 65 bp, Artificial Sequence
  Synthetic
tttatattgcgaaaaataattggcgaacgaggtaactggatacctcatccgccaattaaaatttg

SEQ ID NO: 583 - DNA, 62 bp, Artificial Sequence
  Synthetic
ggaaaatataaataattttagtaacctacatctcaatcaaggatagtaaaactctcactctt

SEQ ID NO: 584 - DNA, 62 bp, Artificial Sequence
  Synthetic
agcacgctgataatcagcaagaccaccaacatttccaccaatgtaaaagctttaaccttagc

SEQ ID NO: 585 - DNA, 65 bp, Artificial Sequence
  Synthetic
gtttatatgtttactaataagacgctctcaacccataaagtcttattagtaaacatatttcaact

SEQ ID NO: 586 - DNA, 65 bp, Artificial Sequence
  Synthetic
atggattttgcagattcccagatgcccctacagaaagaggtacaaaacatttattggaattaatt

SEQ ID NO: 587 - DNA, 65 bp, Artificial Sequence
  Synthetic
tttttgtatgttagttgtgtcactgggtagacctaaatagtgacacaactgctattaaaatttaa

SEQ ID NO: 588 - DNA, 66 bp, Artificial Sequence
  Synthetic
gttcgtggtaactatgggtggtacaggtgccacattagttgtaccatttatgtttatgtggttaac

SEQ ID NO: 589 - DNA, 64 bp, Artificial Sequence
  Synthetic
caataacggttgtatttgtagaacttgaccagttgttttagtaacataaatacaactccgaata

SEQ ID NO: 590 - DNA, 64 bp, Artificial Sequence
  Synthetic
gcatacattgttgttgtttttccagatccagttggtcctgtaaatataagcaatccatgtgagt

SEQ ID NO: 591 - DNA, 52 bp, Artificial Sequence
  Synthetic
gtttagtatctcgttatctctcgttggagggagaagaaacgggataccaaaa

SEQ ID NO: 592 - DNA, 52 bp, Artificial Sequence
  Synthetic
taactttttcggatcgagttatgatggacgtaaagagggaacaaagcatcta

SEQ ID NO: 593 - DNA, 52 bp, Artificial Sequence
  Synthetic
tagtttccaatgttacaggaactgctggcagaatccaacacattggaagtcg

SEQ ID NO: 594 - DNA, 42 bp, Artificial Sequence
  Synthetic
cggtctccatcgggatctgctgatcgagcagcatgccgacca

SEQ ID NO: 595 - DNA, 52 bp, Artificial Sequence
  Synthetic
taaccgcaagtgtacatccctcggctggccgagacaagtacagttgcgacag

SEQ ID NO: 596 - DNA, 42 bp, Artificial Sequence; identical to SEQ ID NO: 594
  Synthetic

SEQ ID NO: 597 - DNA, 52 bp, Artificial Sequence
  Synthetic
atgtggtcctttagatccactgacgtgggtcagtgtctctaaaggactcgcg

SEQ ID NO: 598 - DNA, 53 bp, Artificial Sequence
  Synthetic
catcagggcggtcaggccgtagatgtggaagaaacggcagcacggcgaggacg

SEQ ID NO: 599 - DNA, 32 bp, Artificial Sequence
  Synthetic
cgtttcctgtaaaccgaggttttggataaaca

SEQ ID NO: 600 - DNA, 32 bp, Artificial Sequence
  Synthetic
cgtttcctgtaaaccgaggttttggataatgg

SEQ ID NO: 601 - DNA, 32 bp, Artificial Sequence
  Synthetic
gagttctcttaaaccaaggtttaggattgaaa

SEQ ID NO: 602 - DNA, 32 bp, Artificial Sequence
  Synthetic
gagttctcttaaaccaaggtattggataacag

SEQ ID NO: 603 - DNA, 32 bp, Artificial Sequence
  Synthetic
tggttcttgaaaaccaaggtttttgataaagc

SEQ ID NO: 604 - DNA, 33 bp, Artificial Sequence
  Synthetic
aaattttcctttttggaaggtttttgataacca

SEQ ID NO: 605 - DNA, 32 bp, Artificial Sequence
  Synthetic
gccttcccctaaaccaacgtttttatgccgcc

SEQ ID NO: 606 - DNA, 32 bp, Artificial Sequence
  Synthetic
gccttcccccaaaccaaggtaatcaagaacgc

SEQ ID NO: 607 - DNA, 32 bp, Artificial Sequence
  Synthetic
ttgtgaaatttgggtacaccctaatcatacaa

SEQ ID NO: 608 - DNA, 26 bp, Artificial Sequence
  Synthetic
cgtatgattagggtgtatattaattt

SEQ ID NO: 609 - DNA, 101 bp, Artificial Sequence
  Synthetic
caaatgattttattttgactaataatgacctacttacattaatttactgataattaaagagattttaaatatacaacttattcacctaaaggatgacaaaa

SEQ ID NO: 610 - DNA, 21 bp, Artificial Sequence
  Synthetic
gcactttaggtgaaaaaggtt

SEQ ID NO: 611 - DNA, 126 bp, Artificial Sequence
  Synthetic
taacattaatcacttaaaaatcatcgcattacactaatctgtggttaaatgatagactacataatgcgacaaaacgcaacatatccagtcactatgaatcaactacttagatagtattagtgacct

SEQ ID NO: 612 - DNA, 259 bp, Artificial Sequence
  Synthetic
ctaagtggtttgggacaaaaatgggacatacaaatctttgcatcggtttgcaaggctttgcatgtctttcgaagatgggacgtgtgagcgcaggtatgacgtggtatgtgttgacttaaaaggtagttcttataattcgtaatgcgaaggtcgtaggttcgactcctattatcggcaccagttaaatcaaatacttacgtattattcgtgccttccttatttttactgtgggacatatttgggacagaagtaccaaaaa

SEQ ID NO: 613 - DNA, 27 bp, Artificial Sequence
  Synthetic
gcagcgcattcgtaatgcgaaggtcgt

SEQ ID NO: 614 - DNA, 412 bp, Artificial Sequence
  Synthetic
gcgatccccatccgcgacgtgccaactaggtctcctctcgtcgtgaacaaggctaccgggttgcaactcctgtgcaactctcaggcttcaacgcgcttctacgacctgcaatttctttccacttagaggatgcagccgagaggggtaaaaacctatcttgaccggcccatatgtggtcggcagacacccattcttccaaactagctacgcgggttcgattcccgtcgcccgctccgctggtcagagggtgttttcgccctctggccatttttctttccaggggtctgcaactcttgtgcgactcttctgacctgggcatacgcggttgcaacgcatccctgatctggctactttcgatgctgacaaacgaatagagccccccgcctgcgcgaacagacgaggggcattcaca

SEQ ID NO: 615 - DNA, 43 bp, Artificial Sequence
  Synthetic
gagcgggcgacgggaatcgaacccgcgtagctagtttggaaga

SEQ ID NO: 616 - DNA, 20 bp, Artificial Sequence
  Synthetic
gtcaaccagtatcccggtgc

SEQ ID NO: 617 - DNA, 20 bp, Artificial Sequence
  Synthetic
ggggtcccaggtgctgacgt

SEQ ID NO: 618 - DNA, 21 bp, Artificial Sequence
  Synthetic
gatgtacagagagcccagggc

SEQ ID NO: 619 - DNA, 20 bp, Artificial Sequence
  Synthetic
gtcaaccagtatcccggtgc

SEQ ID NO: 620 - DNA, 21 bp, Artificial Sequence
  Synthetic
gatgtacagagagcccagggc

SEQ ID NO: 621 - DNA, 20 bp, Artificial Sequence
  Synthetic
ggggtcccaggtgctgacgt

SEQ ID NO: 622 - protein, 4 aa, Artificial Sequence
  Synthetic
FCPF

SEQ ID NO: 623-624 - skipped (2 entries)

SEQ ID NO: 625 - DNA, 183 bp, Artificial Sequence
  Synthetic
ttcattcagcaagttcagagaaatctgaacttgctggatttttggagcagggagatggaataggagcttgctccgtccactccacgcatcgacctggtattgcagtacctccaggaacggtgcacccactttctggagtttcaaaagtagactgtacgctaagggtcatatctttttttgttt

SEQ ID NO: 626 - DNA, 21 bp, Artificial Sequence
  Synthetic
gccttgataccaacctgccca

SEQ ID NO: 627 - DNA, 21 bp, Artificial Sequence
  Synthetic
gctggaactggtcaccaaggc

SEQ ID NO: 628 - DNA, 21 bp, Artificial Sequence
  Synthetic
gtacctgaaccgtatatccta

SEQ ID NO: 629 - DNA, 21 bp, Artificial Sequence
  Synthetic
gtacctgaaccgtatatctta

SEQ ID NO: 630 - protein, 535 aa, Artificial Sequence; identical to SEQ ID NO: 398
  Synthetic

SEQ ID NO: 631 - DNA, 1605 bp, Artificial Sequence; identical to SEQ ID NO: 399
  Synthetic

SEQ ID NO: 632 - DNA, 20 bp, Artificial Sequence
  Synthetic
ggcccagactgagcacgtga

SEQ ID NO: 633 - DNA, 20 bp, Artificial Sequence
  Synthetic
ggcccagactgagcacgtga

SEQ ID NO: 634 - DNA, 20 bp, Artificial Sequence
  Synthetic
ggcccagactgagcacgtga

SEQ ID NO: 635 - DNA, 20 bp, Artificial Sequence
  Synthetic
ggcccagactgagcacgtga

SEQ ID NO: 636 - DNA, 20 bp, Artificial Sequence
  Synthetic
ggcccagactgagcacgtga

SEQ ID NO: 637 - DNA, 20 bp, Artificial Sequence
  Synthetic
gtcatcttagtcattacctg

SEQ ID NO: 638 - DNA, 20 bp, Artificial Sequence
  Synthetic
gtcatcttagtcattacctg

SEQ ID NO: 639 - DNA, 20 bp, Artificial Sequence
  Synthetic
gtcatcttagtcattacctg

SEQ ID NO: 640 - DNA, 21 bp, Artificial Sequence
  Synthetic
gcatggtgcacctgactcctg

SEQ ID NO: 641 - DNA, 23 bp, Artificial Sequence
  Synthetic
tctgccatcccgtgctcagtctg

SEQ ID NO: 642 - DNA, 23 bp, Artificial Sequence
  Synthetic
tctgccagcacgtgctcagtctg

SEQ ID NO: 643 - DNA, 23 bp, Artificial Sequence
  Synthetic
tctgccaacacgtgctcagtctg

SEQ ID NO: 644 - DNA, 47 bp, Artificial Sequence
  Synthetic
tggaggaagcagggcttcctttcctctgaaaacacgtgctcagtctg

SEQ ID NO: 645 - DNA, 26 bp, Artificial Sequence
  Synthetic
tctgccatcaaagcgtgctcagtctg

SEQ ID NO: 646 - DNA, 29 bp, Artificial Sequence
  Synthetic
aacgaacacctcatgtaatgactaagatg

SEQ ID NO: 647 - DNA, 29 bp, Artificial Sequence
  Synthetic
aacgaacacctcacgtaatgactaagatg

SEQ ID NO: 648 - DNA, 32 bp, Artificial Sequence
  Synthetic
aacgaacacctcagtacgtaatgactaagatg

SEQ ID NO: 649 - DNA, 27 bp, Artificial Sequence
  Synthetic
agacttctccacaggagtcaggtgcac

SEQ ID NO: 650-659 - skipped (10 entries)

SEQ ID NO: 660 - protein, 1803 aa, Artificial Sequence; identical to SEQ ID NO: 162
  Synthetic

SEQ ID NO: 661 - protein, 2117 aa, Artificial Sequence; identical to SEQ ID NO: 163
  Synthetic

SEQ ID NO: 662 - protein, 2117 aa, Artificial Sequence; identical to SEQ ID NO: 164
  Synthetic

SEQ ID NO: 663 - DNA, 20 bp, Artificial Sequence
  Synthetic
ggcccagactgagcacgtga

SEQ ID NO: 664 - DNA, 20 bp, Artificial Sequence
  Synthetic
ggcccagactgagcacgtga

SEQ ID NO: 665 - DNA, 20 bp, Artificial Sequence
  Synthetic
ggcccagactgagcacgtga

SEQ ID NO: 666 - DNA, 20 bp, Artificial Sequence
  Synthetic
ggcccagactgagcacgtga

SEQ ID NO: 667 - DNA, 20 bp, Artificial Sequence
  Synthetic
ggcactgcggctggaggtgg

SEQ ID NO: 668 - DNA, 20 bp, Artificial Sequence
  Synthetic
ggcactgcggctggaggtgg

SEQ ID NO: 669 - DNA, 20 bp, Artificial Sequence
  Synthetic
ggcactgcggctggaggtgg

SEQ ID NO: 670 - DNA, 20 bp, Artificial Sequence
  Synthetic
ggcactgcggctggaggtgg

SEQ ID NO: 671 - DNA, 20 bp, Artificial Sequence
  Synthetic
gagtccgagcagaagaagaa

SEQ ID NO: 672 - DNA, 20 bp, Artificial Sequence
  Synthetic
gagtccgagcagaagaagaa

SEQ ID NO: 673 - DNA, 20 bp, Artificial Sequence
  Synthetic
gagtccgagcagaagaagaa

SEQ ID NO: 674 - DNA, 20 bp, Artificial Sequence
  Synthetic
gagtccgagcagaagaagaa

SEQ ID NO: 675 - DNA, 20 bp, Artificial Sequence
  Synthetic
ggaatcccttctgcagcacc

SEQ ID NO: 676 - DNA, 20 bp, Artificial Sequence
  Synthetic
ggaatcccttctgcagcacc

SEQ ID NO: 677 - DNA, 20 bp, Artificial Sequence
  Synthetic
ggaatcccttctgcagcacc

SEQ ID NO: 678 - DNA, 23 bp, Artificial Sequence
  Synthetic
tctgccatctcgtgctcagtctg

SEQ ID NO: 679 - DNA, 26 bp, Artificial Sequence
  Synthetic
tctgccatcaaagcgtgctcagtctg

SEQ ID NO: 680 - DNA, 22 bp, Artificial Sequence
  Synthetic
tctgccatccgtgctcagtctg

SEQ ID NO: 681 - DNA, 23 bp, Artificial Sequence
  Synthetic
tctgcgatcacgtgctcagtctg

SEQ ID NO: 682 - DNA, 19 bp, Artificial Sequence
  Synthetic
ttaacgcccacctccagcc

SEQ ID NO: 683 - DNA, 19 bp, Artificial Sequence
  Synthetic
ttaacccccccctccagcc

SEQ ID NO: 684 - DNA, 22 bp, Artificial Sequence
  Synthetic
ttaaccccttacacctccagcc

SEQ ID NO: 685 - DNA, 18 bp, Artificial Sequence
  Synthetic
ttaaccccccctccagcc

SEQ ID NO: 686 - DNA, 30 bp, Artificial Sequence
  Synthetic
gtgatgggagcacttcttcttctgctcgga

SEQ ID NO: 687 - DNA, 30 bp, Artificial Sequence
  Synthetic
gtgatgggagccctgcttcttctgctcgga

SEQ ID NO: 688 - DNA, 33 bp, Artificial Sequence
  Synthetic
gtgatgggagcccttcgcattcttctgctcgga

SEQ ID NO: 689 - DNA, 27 bp, Artificial Sequence
  Synthetic
gtgatgggagttcttcttctgctcgga

SEQ ID NO: 690 - DNA, 31 bp, Artificial Sequence
  Synthetic
ggaaaagcgatgcaggtgctgcagaagggat

SEQ ID NO: 691 - DNA, 31 bp, Artificial Sequence
  Synthetic
ggaaaagcgatccaggcgctgcagaagggat

SEQ ID NO: 692 - DNA, 34 bp, Artificial Sequence
  Synthetic
ggaaaagcgatccaatcggtgctgcagaagggat

SEQ ID NO: 693-699 - skipped (7 entries)

SEQ ID NO: 700 - protein, 677 aa, Unknown; identical to SEQ ID NO: 106
  MURINE LEUKEMIA VIRUS

SEQ ID NO: 701 - protein, 677 aa, Artificial Sequence; identical to SEQ ID NO: 107
  Synthetic

SEQ ID NO: 702 - protein, 677 aa, Artificial Sequence; identical to SEQ ID NO: 108
  Synthetic

SEQ ID NO: 703 - protein, 677 aa, Artificial Sequence; identical to SEQ ID NO: 109
  Synthetic

SEQ ID NO: 704 - protein, 677 aa, Artificial Sequence; identical to SEQ ID NO: 110
  Synthetic

SEQ ID NO: 705 - protein, 677 aa, Artificial Sequence; identical to SEQ ID NO: 111
  Synthetic

SEQ ID NO: 706 - protein, 677 aa, Artificial Sequence; identical to SEQ ID NO: 112
  Synthetic

SEQ ID NO: 707 - protein, 677 aa, Artificial Sequence; identical to SEQ ID NO: 113
  Synthetic

SEQ ID NO: 708 - protein, 677 aa, Artificial Sequence; identical to SEQ ID NO: 114
  Synthetic

SEQ ID NO: 709 - protein, 677 aa, Artificial Sequence; identical to SEQ ID NO: 115
  Synthetic

SEQ ID NO: 710 - protein, 677 aa, Artificial Sequence; identical to SEQ ID NO: 116
  Synthetic

SEQ ID NO: 711 - protein, 677 aa, Artificial Sequence; identical to SEQ ID NO: 117
  Synthetic

SEQ ID NO: 712 - protein, 677 aa, Artificial Sequence; identical to SEQ ID NO: 118
  Synthetic

SEQ ID NO: 713 - protein, 677 aa, Artificial Sequence; identical to SEQ ID NO: 119
  Synthetic

SEQ ID NO: 714 - protein, 677 aa, Artificial Sequence; identical to SEQ ID NO: 120
  Synthetic

SEQ ID NO: 715 - protein, 677 aa, Artificial Sequence; identical to SEQ ID NO: 121
  Synthetic

SEQ ID NO: 716 - protein, 677 aa, Artificial Sequence; identical to SEQ ID NO: 122
  Synthetic

SEQ ID NO: 717 - DNA, 100 bp, Artificial Sequence
  Synthetic
gcttctccagccctggcctgggtcaatccttggggcccagactgagcacgtgttggcagaggaaaggaagccctgcttcctccagagggcgtcgcaggac

SEQ ID NO: 718 - DNA, 100 bp, Artificial Sequence
  Synthetic
gcttctccagccctggcctgggtcaatccttggggcccagactgagcacgtgttttcagaggaaaggaagccctgcttcctccagagggcgtcgcaggac

SEQ ID NO: 719 - DNA, 100 bp, Artificial Sequence
  Synthetic
gcttctccagccctggcctgggtcaatccttggggcccagactgagcacgggatggcagaggaaaggaagccctgcttcctccagagggcgtcgcaggac

SEQ ID NO: 720 - DNA, 100 bp, Artificial Sequence
  Synthetic
gcttctccagccctggcctgggtcaatccttggggcccagactgagcacgtgctggcagaggaaaggaagccctgcttcctccagagggcgtcgcaggac

SEQ ID NO: 721 - DNA, 103 bp, Artificial Sequence
  Synthetic
gcttctccagccctggcctgggtcaatccttggggcccagactgagcacgctttgatggcagaggaaaggaagccctgcttcctccagagggcgtcgcaggac

SEQ ID NO: 722 - DNA, 100 bp, Artificial Sequence
  Synthetic
cccagtttacacgtctcatatgccccttggcagtcatcttagtcattacatgaggtgttcgttgtaactcatataaactgagttcccatgttttgcttaa

SEQ ID NO: 723 - DNA, 100 bp, Artificial Sequence
  Synthetic
cccagtttacacgtctcatatgccccttggcagtcatcttagtcattacgtgaggtgttcgttgtaactcatataaactgagttcccatgttttgcttaa

SEQ ID NO: 724 - DNA, 100 bp, Artificial Sequence
  Synthetic
cagtttacacgtctcatatgccccttggcagtcatcttagtcattacgtactgaggtgttcgttgtaactcatataaactgagttcccatgttttgctta

SEQ ID NO: 725 - DNA, 100 bp, Artificial Sequence
  Synthetic
acttcatccacgttcaccttgccccacagggcagtaacggcagacttctccacaggagtcagatgcaccatggtgtctgtttgaggttgctagtgaacac

SEQ ID NO: 726 - DNA, 100 bp, Artificial Sequence
  Synthetic
acttcatccacgttcaccttgccccacagggcagtaacggcagacttctcctcaggagtcaggtgcaccatggtgtctgtttgaggttgctagtgaacac

SEQ ID NO: 727 - DNA, 100 bp, Artificial Sequence
  Synthetic
gtgttcactagcaacctcaaacagacaccatggtgcacctgactcctgaggagaagtctgccgttactgccctgtggggcaaggtgaacgtggatgaagt

SEQ ID NO: 728 - DNA, 100 bp, Artificial Sequence
  Synthetic
gtgttcactagcaacctcaaacagacaccatggtgcacctgactcctgatgagaagtctgccgttactgccctgtggggcaaggtgaacgtggatgaagt

SEQ ID NO: 729 - DNA, 100 bp, Artificial Sequence
  Synthetic
cacatggctggtgctgcagcagctggggcagtggtggggggccttggcgtctacatgctgggaagtgccatgagcaggcccatcatacatttcggcagtg

SEQ ID NO: 730 - DNA, 9224 bp, Artificial Sequence
  Synthetic
atgtctaaaggtgaagaattattcactggtgttgtcccaattttggttgaattagatggtgatgttaatggtcacaaattttctgtctccggtgaaggtgaaggtgatgctacttacggtaaattgaccttaaaatttatttgtactactggtaaattgccagttccatggccaaccttagtcactactttcggttatggtgttcaatgttttgctagatacccagatcatatgaaacaacatgactttttcaagtctgccatgccagaaggttatgttcaagaaagaactatttttttcaaagatgacggtaactacaagaccagagctgaagtcaagtttgaaggtgataccttagttaatagaatcgaattaaaaggtattgattttaaagaagatggtaacattttaggtcacaaattggaatacaactataactctcacaatgtttacatcatggctgacaaacaaaagaatggtatcaaagttaacttcaaaattagacacaacattgaagatggttctgttcaattagctgaccattatcaacaaaatactccaattggtgatggtccagtcttgttaccagacaaccattacttatccactcaatctgccttatccaaagatccaaacgaaaagagagaccacatggtcttgttagaatttgttactgctgctggtattacccatggtatggatgaattgtacaaagctagcaacctgggtcaatccttggggcccagactgagcacgtgatggcagagcacaggagacgtcatggtttcaaaaggtgaagaagataatatggctattattaaagaatttatgagatttaaagttcatatggaaggttcagttaatggtcatgaatttgaaattgaaggtgaaggtgaaggtagaccatatgaaggtactcaaactgctaaattgaaagttactaaaggtggtccattaccatttgcttgggatattttgtcaccacaatttatgtatggttcaaaagcttatgttaaacatccagctgatattccagattatttaaaattgtcatttccagaaggttttaaatgggaaagagttatgaattttgaagatggtggtgttgttactgttactcaagattcatcattacaagatggtgaatttatttataaagttaaattgagaggtactaattttccatcagatggtccagttatgcaaaaaaaaactatgggttgggaagcttcatcagaaagaatgtatccagaagatggtgctttaaaaggtgaaattaaacaaagattgaaattaaaagatggtggtcattatgatgctgaagttaaaactacttataaagctaaaaaaccagttcaattaccaggtgcttataatgttaatattaaattggatattacttcacataatgaagattatactattgttgaacaatatgaaagagctgaaggtagacattcaactggtggtatggatgaattatataaaggtaccgctcgagcagctgtgattgattgagtcgacttggttgaacacgttgccaaggcttaagtgaatttactttaaatcttgcatttaaataaattttctttttatagctttatgacttagtttcaatttatatactattttaatgacattttcgattcggatccactagttctagagcggccgccaccgcggtggagctccagcttttgttccctttagtgagggttaattgcgcgcttggcgtaatcatggtcatagctgtttcctgtgtgaaattgttatccgctcacaattccacacaacataggagccggaagcataaagtgtaaagcctggggtgcctaatgagtgaggtaactcacattaattgcgttgcgctcactgcccgctttccagtcgggaaacctgtcgtgccagctgcattaatgaatcggccaacgcgcggggagaggcggtttgcgtattgggcgctcttccgcttcctcgctcactgactcgctgcgctcggtcgttcggctgcggcgagcggtatcagctcactcaaaggcggtaatacggttatccacagaatcaggggataacgcaggaaagaacatgtgagcaaaaggccagcaaaaggccaggaaccgtaaaaaggccgcgttgctggcgtttttccataggctccgcccccctgacgagcatcacaaaaatcgacgctcaagtcagaggtggcgaaacccgacaggactataaagataccaggcgtttccccctggaagctccctcgtgcgctctcctgttccgaccctgccgcttaccggatacctgtccgcctttctcccttcgggaagcgtggcgctttctcatagctcacgctgtaggtatctcagttcggtgtaggtcgttcgctccaagctgggctgtgtgcacgaaccccccgttcagcccgaccgctgcgccttatccggtaactatcgtcttgagtccaacccggtaagacacgacttatcgccactggcagcagccactggtaacaggattagcagagcgaggtatgtaggcggtgctacagagttcttgaagtggtggcctaactacggctacactagaaggacagtatttggtatctgcgctctgctgaagccagttaccttcggaaaaagagttggtagctcttgatccggcaaacaaaccaccgctggtagcggtggtttttttgtttgcaagcagcagattacgcgcagaaaaaaaggatctcaagaagatcctttgatcttttctacggggtctgacgctcagtggaacgaaaactcacgttaagggattttggtcatgagattatcaaaaaggatcttcacctagatccttttaaattaaaaatgaagttttaaatcaatctaaagtatatatgagtaaacttggtctgacagttaccaatgcttaatcagtgaggcacctatctcagcgatctgtctatttcgttcatccatagttgcctgactccccgtcgtgtagataactacgatacgggagggcttaccatctggccccagtgctgcaatgataccgcgagacccacgctcaccggctccagatttatcagcaataaaccagccagccggaagggccgagcgcagaagtggtcctgcaactttatccgcctccatccagtctattaattgttgccgggaagctagagtaagtagttcgccagttaatagtttgcgcaacgttgttgccattgctacaggcatcgtggtgtcacgctcgtcgtttggtatggcttcattcagctccggttcccaacgatcaaggcgagttacatgatcccccatgttgtgcaaaaaagcggttagctccttcggtcctccgatcgttgtcagaagtaagttggccgcagtgttatcactcatggttatggcagcactgcataattctcttactgtcatgccatccgtaagatgcttttctgtgactggtgagtactcaaccaagtcattctgagaatagtgtatgcggcgaccgagttgctcttgcccggcgtcaatacgggataataccgcgccacatagcagaactttaaaagtgctcatcattggaaaacgttcttcggggcgaaaactctcaaggatcttaccgctgttgagatccagttcgatgtaacccactcgtgcacccaactgatcttcagcatcttttactttcaccagcgtttctgggtgagcaaaaacaggaaggcaaaatgccgcaaaaaagggaataagggcgacacggaaatgttgaatactcatactcttcctttttcaatattattgaagcatttatcagggttattgtctcatgagcggatacatatttgaatgtatttagaaaaataaacaaataggggttccgcgcacatttccccgaaaagtgccacctgaacgaagcatctgtgcttcattttgtagaacaaaaatgcaacgcgagagcgctaatttttcaaacaaagaatctgagctgcatttttacagaacagaaatgcaacgcgaaagcgctattttaccaacgaagaatctgtgcttcatttttgtaaaacaaaaatgcaacgcgagagcgctaatttttcaaacaaagaatctgagctgcatttttacagaacagaaatgcaacgcgagagcgctattttaccaacaaagaatctatacttcttttttgttctacaaaaatgcatcccgagagcgctatttttctaacaaagcatcttagattactttttttctcctttgtgcgctctataatgcagtctcttgataactttttgcactgtaggtccgttaaggttagaagaaggctactttggtgtctattttctcttccataaaaaaagcctgactccacttcccgcgtttactgattactagcgaagctgcgggtgcattttttcaagataaaggcatccccgattatattctataccgatgtggattgcgcatactttgtgaacagaaagtgatagcgttgatgattcttcattggtcagaaaattatgaacggtttcttctattttgtctctatatactacgtataggaaatgtttacattttcgtattgttttcgattcactctatgaatagttcttactacaatttttttgtctaaagagtaatactagagataaacataaaaaatgtagaggtcgagtttagatgcaagttcaaggagcgaaaggtggatgggtaggttatatagggatatagcacagagatatatagcaaagagatacttttgagcaatgtttgtggaagcggtattcgcaatattttagtagctcgttacagtccggtgcgtttttggttttttgaaagtgcgtcttcagagcgcttttggttttcaaaagcgctctgaagttcctatactttctagagaataggaacttcggaataggaacttcaaagcgtttccgaaaacgagcgcttccgaaaatgcaacgcgagctgcgcacatacagctcactgttcacgtcgcacctatatctgcgtgttgcctgtatatatatatacatgagaagaacggcatagtgcgtgtttatgcttaaatgcgtacttatatgcgtctatttatgtaggatgaaaggtagtctagtacctcctgtgatattatcccattccatgcggggtatcgtatgcttccttcagcactaccctttagctgttctatatgctgccactcctcaattggattagtctcatccttcaatgctatcatttcctttgatattggatcatactaagaaaccattattatcatgacattaacctataaaaataggcgtatcacgaggccctttcgtctcgcgcgtttcggtgatgacggtgaaaacctctgacacatgcagctcccggagacggtcacagcttgtctgtaagcggatgccgggagcagacaagcccgtcagggcgcgtcagcgggtgttggcgggtgtcggggctggcttaactatgcggcatcagagcagattgtactgagagtgcaccatatcgactacgtcgtaaggccgtttctgacagagtaaaattcttgagggaactttcaccattatgggaaatgcttcaagaaggtattgacttaaactccatcaaatggtcaggtcattgagtgttttttatttgttgtatttttttttttttagagaaaatcctccaatatcaaattaggaatcgtagtttcatgattttctgttacacctaactttttgtgtggtgccctcctccttgtcaatattaatgttaaagtgcaattctttttccttatcacgttgagccattagtatcaatttgcttacctgtattcctttactatcctcctttttctccttcttgataaatgtatgtagattgcgtatatagtttcgtctaccctatgaacatattccattttgtaatttcgtgtcgtttctattatgaatttcatttataaagtttatgtacaaatatcataaaaaaagagaatctttttaagcaaggattttcttaacttcttcggcgacagcatcaccgacttcggtggtactgttggaaccacctaaatcaccagttctgatacctgcatccaaaacctttttaactgcatcttcaatggccttaccttcttcaggcaagttcaatgacaatttcaacatcattgcagcagacaagatagtggcgatagggtcaaccttattctttggcaaatctggagcagaaccgtggcatggttcgtacaaaccaaatgcggtgttcttgtctggcaaagaggccaaggacgcagatggcaacaaacccaaggaacctgggataacggaggcttcatcggagatgatatcaccaaacatgttgctggtgattataataccatttaggtgggttgggttcttaactaggatcatggcggcagaatcaatcaattgatgttgaaccttcaatgtagggaattcgttcttgatggtttcctccacagtttttctccataatcttgaagaggccaaaagattagctttatccaaggaccaaataggcaatggtggctcatgttgtagggccatgaaagcggccattcttgtgattctttgcacttctggaacggtgtattgttcactatcccaagcgacaccatcaccatcgtcttcctttctcttaccaaagtaaatacctcccactaattctctgacaacaacgaagtcagtacctttagcaaattgtggcttgattggagataagtctaaaagagagtcggatgcaaagttacatggtcttaagttggcgtacaattgaagttctttacggatttttagtaaaccttgttcaggtctaacactaccggtaccccatttaggaccagccacagcacctaacaaaacggcatcaaccttcttggaggcttccagcgcctcatctggaagtgggacacctgtagcatcgatagcagcaccaccaattaaatgattttcgaaatcgaacttgacattggaacgaacatcagaaatagctttaagaaccttaatggcttcggctgtgatttcttgaccaacgtggtcacctggcaaaacgacgatcttcttaggggcagacataggggcagacattagaatggtatatccttgaaatatatatatatattgctgaaatgtaaaaggtaagaaaagttagaaagtaagacgattgctaaccacctattggaaaaaacaataggtccttaaataatattgtcaacttcaagtattgtgatgcaagcatttagtcatgaacgcttctctattctatatgaaaagccggttccggcctctcacctttcctttttctcccaatttttcagttgaaaaaggtatatgcgtcaggcgacctctgaaattaacaaaaaatttccagtcatcgaatttgattctgtgcgatagcgcccctgtgtgttctcgttatgttgaggaaaaaaataatggttgctaagagattcgaactcttgcatcttacgatacctgagtattcccacagttaactgcggtcaagatatttcttgaatcaggcgccttagaccgctcggccaaacaaccaattacttgttgagaaatagagtataattatcctataaatataacgtttttgaacacacatgaacaaggaagtacaggacaattgattttgaagagaatgtggattttgatgtaattgttgggattccatttttaataaggcaataatattaggtatgtggatatactagaagttctcctcgaccgtcgatatgcggtgtgaaataccgcacagatgcgtaaggagaaaataccgcatcaggaaattgtaaacgttaatattttgttaaaattcgcgttaaatttttgttaaatcagctcattttttaaccaataggccgaaatcggcaaaatcccttataaatcaaaagaatagaccgagatagggttgagtgttgttccagtttggaacaagagtccactattaaagaacgtggactccaacgtcaaagggcgaaaaaccgtctatcagggcgatggcccactacgtgaaccatcaccctaatcaagttttttggggtcgaggtgccgtaaagcactaaatcggaaccctaaagggagcccccgatttagagcttgacggggaaagccggcgaacgtggcgagaaaggaagggaagaaagcgaaaggagcgggcgctagggcgctggcaagtgtagcggtcacgctgcgcgtaaccaccacacccgccgcgcttaatgcgccgctacagggcgcgtcgcgccattcgccattcaggctgcgcaactgttgggaagggcgatcggtgcgggcctcttcgctattacgccagctggcgaaagggggatgtgctgcaaggcgattaagttgggtaacgccagggttttcccagtcacgacgttgtaaaacgacggccagtgagcgcgcgtaatacgactcactatagggcgaattgggtaccgggccccccctcgaggtcgacggtatcgataagcttgatatcgaattcctgcagcccgggggatccgttagaatcattttgaataaaaaacacgctttttcagttcgagtttatcattatcaatactgccatttcaaagaatacgtaaataattaatagtagtgattttcctaactttatttagtcaaaaaattagccttttaattctgctgtaacccgtacatgcccaaaatagggggcgggttacacagaatatataacatcgtaggtgtctgggtgaacagtttattcctggcatccactaaatataatggagcccgctttttaagctggcatccagaaaaaaaaagaatcccagcaccaaaatattgttttcttcaccaaccatcagttcataggtccattctcttagcgcaactacagagaacaggggcacaaacaggcaaaaaacgggcacaacctcaatggagtgatgcaacctgcctggagtaaatgatgacacaaggcaattgacccacgcatgtatctatctcattttcttacaccttctattaccttctgctctctctgatttggaaaaagctgaaaaaaaaggttgaaaccagttccctgaaattattcccctacttgactaataagtatataaagacggtaggtattgattgtaattctgtaaatctatttcttaaacttcttaaattctacttttatagttagtcttttttttagttttaaaacaccaagaacttagtttcgaataaacacacataaacaaacaaagaattc

SEQ ID NO: 731 - DNA, 9225 bp, Artificial Sequence
  Synthetic
atgtctaaaggtgaagaattattcactggtgttgtcccaattttggttgaattagatggtgatgttaatggtcacaaattttctgtctccggtgaaggtgaaggtgatgctacttacggtaaattgaccttaaaatttatttgtactactggtaaattgccagttccatggccaaccttagtcactactttcggttatggtgttcaatgttttgctagatacccagatcatatgaaacaacatgactttttcaagtctgccatgccagaaggttatgttcaagaaagaactatttttttcaaagatgacggtaactacaagaccagagctgaagtcaagtttgaaggtgataccttagttaatagaatcgaattaaaaggtattgattttaaagaagatggtaacattttaggtcacaaattggaatacaactataactctcacaatgtttacatcatggctgacaaacaaaagaatggtatcaaagttaacttcaaaattagacacaacattgaagatggttctgttcaattagctgaccattatcaacaaaatactccaattggtgatggtccagtcttgttaccagacaaccattacttatccactcaatctgccttatccaaagatccaaacgaaaagagagaccacatggtcttgttagaatttgttactgctgctggtattacccatggtatggatgaattgtacaaagctagcaaacctgggtcaatccttggggcccagactgagcacgtgatggcagagcacaggagacgtcatggtttcaaaaggtgaagaagataatatggctattattaaagaatttatgagatttaaagttcatatggaaggttcagttaatggtcatgaatttgaaattgaaggtgaaggtgaaggtagaccatatgaaggtactcaaactgctaaattgaaagttactaaaggtggtccattaccatttgcttgggatattttgtcaccacaatttatgtatggttcaaaagcttatgttaaacatccagctgatattccagattatttaaaattgtcatttccagaaggttttaaatgggaaagagttatgaattttgaagatggtggtgttgttactgttactcaagattcatcattacaagatggtgaatttatttataaagttaaattgagaggtactaattttccatcagatggtccagttatgcaaaaaaaaactatgggttgggaagcttcatcagaaagaatgtatccagaagatggtgctttaaaaggtgaaattaaacaaagattgaaattaaaagatggtggtcattatgatgctgaagttaaaactacttataaagctaaaaaaccagttcaattaccaggtgcttataatgttaatattaaattggatattacttcacataatgaagattatactattgttgaacaatatgaaagagctgaaggtagacattcaactggtggtatggatgaattatataaaggtaccgctcgagcagctgtgattgattgagtcgacttggttgaacacgttgccaaggcttaagtgaatttactttaaatcttgcatttaaataaattttctttttatagctttatgacttagtttcaatttatatactattttaatgacattttcgattcggatccactagttctagagcggccgccaccgcggtggagctccagcttttgttccctttagtgagggttaattgcgcgcttggcgtaatcatggtcatagctgtttcctgtgtgaaattgttatccgctcacaattccacacaacataggagccggaagcataaagtgtaaagcctggggtgcctaatgagtgaggtaactcacattaattgcgttgcgctcactgcccgctttccagtcgggaaacctgtcgtgccagctgcattaatgaatcggccaacgcgcggggagaggcggtttgcgtattgggcgctcttccgcttcctcgctcactgactcgctgcgctcggtcgttcggctgcggcgagcggtatcagctcactcaaaggcggtaatacggttatccacagaatcaggggataacgcaggaaagaacatgtgagcaaaaggccagcaaaaggccaggaaccgtaaaaaggccgcgttgctggcgtttttccataggctccgcccccctgacgagcatcacaaaaatcgacgctcaagtcagaggtggcgaaacccgacaggactataaagataccaggcgtttccccctggaagctccctcgtgcgctctcctgttccgaccctgccgcttaccggatacctgtccgcctttctcccttcgggaagcgtggcgctttctcatagctcacgctgtaggtatctcagttcggtgtaggtcgttcgctccaagctgggctgtgtgcacgaaccccccgttcagcccgaccgctgcgccttatccggtaactatcgtcttgagtccaacccggtaagacacgacttatcgccactggcagcagccactggtaacaggattagcagagcgaggtatgtaggcggtgctacagagttcttgaagtggtggcctaactacggctacactagaaggacagtatttggtatctgcgctctgctgaagccagttaccttcggaaaaagagttggtagctcttgatccggcaaacaaaccaccgctggtagcggtggtttttttgtttgcaagcagcagattacgcgcagaaaaaaaggatctcaagaagatcctttgatcttttctacggggtctgacgctcagtggaacgaaaactcacgttaagggattttggtcatgagattatcaaaaaggatcttcacctagatccttttaaattaaaaatgaagttttaaatcaatctaaagtatatatgagtaaacttggtctgacagttaccaatgcttaatcagtgaggcacctatctcagcgatctgtctatttcgttcatccatagttgcctgactccccgtcgtgtagataactacgatacgggagggcttaccatctggccccagtgctgcaatgataccgcgagacccacgctcaccggctccagatttatcagcaataaaccagccagccggaagggccgagcgcagaagtggtcctgcaactttatccgcctccatccagtctattaattgttgccgggaagctagagtaagtagttcgccagttaatagtttgcgcaacgttgttgccattgctacaggcatcgtggtgtcacgctcgtcgtttggtatggcttcattcagctccggttcccaacgatcaaggcgagttacatgatcccccatgttgtgcaaaaaagcggttagctccttcggtcctccgatcgttgtcagaagtaagttggccgcagtgttatcactcatggttatggcagcactgcataattctcttactgtcatgccatccgtaagatgcttttctgtgactggtgagtactcaaccaagtcattctgagaatagtgtatgcggcgaccgagttgctcttgcccggcgtcaatacgggataataccgcgccacatagcagaactttaaaagtgctcatcattggaaaacgttcttcggggcgaaaactctcaaggatcttaccgctgttgagatccagttcgatgtaacccactcgtgcacccaactgatcttcagcatcttttactttcaccagcgtttctgggtgagcaaaaacaggaaggcaaaatgccgcaaaaaagggaataagggcgacacggaaatgttgaatactcatactcttcctttttcaatattattgaagcatttatcagggttattgtctcatgagcggatacatatttgaatgtatttagaaaaataaacaaataggggttccgcgcacatttccccgaaaagtgccacctgaacgaagcatctgtgcttcattttgtagaacaaaaatgcaacgcgagagcgctaatttttcaaacaaagaatctgagctgcatttttacagaacagaaatgcaacgcgaaagcgctattttaccaacgaagaatctgtgcttcatttttgtaaaacaaaaatgcaacgcgagagcgctaatttttcaaacaaagaatctgagctgcatttttacagaacagaaatgcaacgcgagagcgctattttaccaacaaagaatctatacttcttttttgttctacaaaaatgcatcccgagagcgctatttttctaacaaagcatcttagattactttttttctcctttgtgcgctctataatgcagtctcttgataactttttgcactgtaggtccgttaaggttagaagaaggctactttggtgtctattttctcttccataaaaaaagcctgactccacttcccgcgtttactgattactagcgaagctgcgggtgcattttttcaagataaaggcatccccgattatattctataccgatgtggattgcgcatactttgtgaacagaaagtgatagcgttgatgattcttcattggtcagaaaattatgaacggtttcttctattttgtctctatatactacgtataggaaatgtttacattttcgtattgttttcgattcactctatgaatagttcttactacaatttttttgtctaaagagtaatactagagataaacataaaaaatgtagaggtcgagtttagatgcaagttcaaggagcgaaaggtggatgggtaggttatatagggatatagcacagagatatatagcaaagagatacttttgagcaatgtttgtggaagcggtattcgcaatattttagtagctcgttacagtccggtgcgtttttggttttttgaaagtgcgtcttcagagcgcttttggttttcaaaagcgctctgaagttcctatactttctagagaataggaacttcggaataggaacttcaaagcgtttccgaaaacgagcgcttccgaaaatgcaacgcgagctgcgcacatacagctcactgttcacgtcgcacctatatctgcgtgttgcctgtatatatatatacatgagaagaacggcatagtgcgtgtttatgcttaaatgcgtacttatatgcgtctatttatgtaggatgaaaggtagtctagtacctcctgtgatattatcccattccatgcggggtatcgtatgcttccttcagcactaccctttagctgttctatatgctgccactcctcaattggattagtctcatccttcaatgctatcatttcctttgatattggatcatactaagaaaccattattatcatgacattaacctataaaaataggcgtatcacgaggccctttcgtctcgcgcgtttcggtgatgacggtgaaaacctctgacacatgcagctcccggagacggtcacagcttgtctgtaagcggatgccgggagcagacaagcccgtcagggcgcgtcagcgggtgttggcgggtgtcggggctggcttaactatgcggcatcagagcagattgtactgagagtgcaccatatcgactacgtcgtaaggccgtttctgacagagtaaaattcttgagggaactttcaccattatgggaaatgcttcaagaaggtattgacttaaactccatcaaatggtcaggtcattgagtgttttttatttgttgtatttttttttttttagagaaaatcctccaatatcaaattaggaatcgtagtttcatgattttctgttacacctaactttttgtgtggtgccctcctccttgtcaatattaatgttaaagtgcaattctttttccttatcacgttgagccattagtatcaatttgcttacctgtattcctttactatcctcctttttctccttcttgataaatgtatgtagattgcgtatatagtttcgtctaccctatgaacatattccattttgtaatttcgtgtcgtttctattatgaatttcatttataaagtttatgtacaaatatcataaaaaaagagaatctttttaagcaaggattttcttaacttcttcggcgacagcatcaccgacttcggtggtactgttggaaccacctaaatcaccagttctgatacctgcatccaaaacctttttaactgcatcttcaatggccttaccttcttcaggcaagttcaatgacaatttcaacatcattgcagcagacaagatagtggcgatagggtcaaccttattctttggcaaatctggagcagaaccgtggcatggttcgtacaaaccaaatgcggtgttcttgtctggcaaagaggccaaggacgcagatggcaacaaacccaaggaacctgggataacggaggcttcatcggagatgatatcaccaaacatgttgctggtgattataataccatttaggtgggttgggttcttaactaggatcatggcggcagaatcaatcaattgatgttgaaccttcaatgtagggaattcgttcttgatggtttcctccacagtttttctccataatcttgaagaggccaaaagattagctttatccaaggaccaaataggcaatggtggctcatgttgtagggccatgaaagcggccattcttgtgattctttgcacttctggaacggtgtattgttcactatcccaagcgacaccatcaccatcgtcttcctttctcttaccaaagtaaatacctcccactaattctctgacaacaacgaagtcagtacctttagcaaattgtggcttgattggagataagtctaaaagagagtcggatgcaaagttacatggtcttaagttggcgtacaattgaagttctttacggatttttagtaaaccttgttcaggtctaacactaccggtaccccatttaggaccagccacagcacctaacaaaacggcatcaaccttcttggaggcttccagcgcctcatctggaagtgggacacctgtagcatcgatagcagcaccaccaattaaatgattttcgaaatcgaacttgacattggaacgaacatcagaaatagctttaagaaccttaatggcttcggctgtgatttcttgaccaacgtggtcacctggcaaaacgacgatcttcttaggggcagacataggggcagacattagaatggtatatccttgaaatatatatatatattgctgaaatgtaaaaggtaagaaaagttagaaagtaagacgattgctaaccacctattggaaaaaacaataggtccttaaataatattgtcaacttcaagtattgtgatgcaagcatttagtcatgaacgcttctctattctatatgaaaagccggttccggcctctcacctttcctttttctcccaatttttcagttgaaaaaggtatatgcgtcaggcgacctctgaaattaacaaaaaatttccagtcatcgaatttgattctgtgcgatagcgcccctgtgtgttctcgttatgttgaggaaaaaaataatggttgctaagagattcgaactcttgcatcttacgatacctgagtattcccacagttaactgcggtcaagatatttcttgaatcaggcgccttagaccgctcggccaaacaaccaattacttgttgagaaatagagtataattatcctataaatataacgtttttgaacacacatgaacaaggaagtacaggacaattgattttgaagagaatgtggattttgatgtaattgttgggattccatttttaataaggcaataatattaggtatgtggatatactagaagttctcctcgaccgtcgatatgcggtgtgaaataccgcacagatgcgtaaggagaaaataccgcatcaggaaattgtaaacgttaatattttgttaaaattcgcgttaaatttttgttaaatcagctcattttttaaccaataggccgaaatcggcaaaatcccttataaatcaaaagaatagaccgagatagggttgagtgttgttccagtttggaacaagagtccactattaaagaacgtggactccaacgtcaaagggcgaaaaaccgtctatcagggcgatggcccactacgtgaaccatcaccctaatcaagttttttggggtcgaggtgccgtaaagcactaaatcggaaccctaaagggagcccccgatttagagcttgacggggaaagccggcgaacgtggcgagaaaggaagggaagaaagcgaaaggagcgggcgctagggcgctggcaagtgtagcggtcacgctgcgcgtaaccaccacacccgccgcgcttaatgcgccgctacagggcgcgtcgcgccattcgccattcaggctgcgcaactgttgggaagggcgatcggtgcgggcctcttcgctattacgccagctggcgaaagggggatgtgctgcaaggcgattaagttgggtaacgccagggttttcccagtcacgacgttgtaaaacgacggccagtgagcgcgcgtaatacgactcactatagggcgaattgggtaccgggccccccctcgaggtcgacggtatcgataagcttgatatcgaattcctgcagcccgggggatccgttagaatcattttgaataaaaaacacgctttttcagttcgagtttatcattatcaatactgccatttcaaagaatacgtaaataattaatagtagtgattttcctaactttatttagtcaaaaaattagccttttaattctgctgtaacccgtacatgcccaaaatagggggcgggttacacagaatatataacatcgtaggtgtctgggtgaacagtttattcctggcatccactaaatataatggagcccgctttttaagctggcatccagaaaaaaaaagaatcccagcaccaaaatattgttttcttcaccaaccatcagttcataggtccattctcttagcgcaactacagagaacaggggcacaaacaggcaaaaaacgggcacaacctcaatggagtgatgcaacctgcctggagtaaatgatgacacaaggcaattgacccacgcatgtatctatctcattttcttacaccttctattaccttctgctctctctgatttggaaaaagctgaaaaaaaaggttgaaaccagttccctgaaattattcccctacttgactaataagtatataaagacggtaggtattgattgtaattctgtaaatctatttcttaaacttcttaaattctacttttatagttagtcttttttttagttttaaaacaccaagaacttagtttcgaataaacacacataaacaaacaaagaattc

SEQ ID NO: 732 - DNA, 9223 bp, Artificial Sequence
  Synthetic
atgtctaaaggtgaagaattattcactggtgttgtcccaattttggttgaattagatggtgatgttaatggtcacaaattttctgtctccggtgaaggtgaaggtgatgctacttacggtaaattgaccttaaaatttatttgtactactggtaaattgccagttccatggccaaccttagtcactactttcggttatggtgttcaatgttttgctagatacccagatcatatgaaacaacatgactttttcaagtctgccatgccagaaggttatgttcaagaaagaactatttttttcaaagatgacggtaactacaagaccagagctgaagtcaagtttgaaggtgataccttagttaatagaatcgaattaaaaggtattgattttaaagaagatggtaacattttaggtcacaaattggaatacaactataactctcacaatgtttacatcatggctgacaaacaaaagaatggtatcaaagttaacttcaaaattagacacaacattgaagatggttctgttcaattagctgaccattatcaacaaaatactccaattggtgatggtccagtcttgttaccagacaaccattacttatccactcaatctgccttatccaaagatccaaacgaaaagagagaccacatggtcttgttagaatttgttactgctgctggtattacccatggtatggatgaattgtacaaagctagcaaacctgggtcaatccttggggcccagactgagcacgtgatggcagagcacaggacgtcatggtttcaaaaggtgaagaagataatatggctattattaaagaatttatgagatttaaagttcatatggaaggttcagttaatggtcatgaatttgaaattgaaggtgaaggtgaaggtagaccatatgaaggtactcaaactgctaaattgaaagttactaaaggtggtccattaccatttgcttgggatattttgtcaccacaatttatgtatggttcaaaagcttatgttaaacatccagctgatattccagattatttaaaattgtcatttccagaaggttttaaatgggaaagagttatgaattttgaagatggtggtgttgttactgttactcaagattcatcattacaagatggtgaatttatttataaagttaaattgagaggtactaattttccatcagatggtccagttatgcaaaaaaaaactatgggttgggaagcttcatcagaaagaatgtatccagaagatggtgctttaaaaggtgaaattaaacaaagattgaaattaaaagatggtggtcattatgatgctgaagttaaaactacttataaagctaaaaaaccagttcaattaccaggtgcttataatgttaatattaaattggatattacttcacataatgaagattatactattgttgaacaatatgaaagagctgaaggtagacattcaactggtggtatggatgaattatataaaggtaccgctcgagcagctgtgattgattgagtcgacttggttgaacacgttgccaaggcttaagtgaatttactttaaatcttgcatttaaataaattttctttttatagctttatgacttagtttcaatttatatactattttaatgacattttcgattcggatccactagttctagagcggccgccaccgcggtggagctccagcttttgttccctttagtgagggttaattgcgcgcttggcgtaatcatggtcatagctgtttcctgtgtgaaattgttatccgctcacaattccacacaacataggagccggaagcataaagtgtaaagcctggggtgcctaatgagtgaggtaactcacattaattgcgttgcgctcactgcccgctttccagtcgggaaacctgtcgtgccagctgcattaatgaatcggccaacgcgcggggagaggcggtttgcgtattgggcgctcttccgcttcctcgctcactgactcgctgcgctcggtcgttcggctgcggcgagcggtatcagctcactcaaaggcggtaatacggttatccacagaatcaggggataacgcaggaaagaacatgtgagcaaaaggccagcaaaaggccaggaaccgtaaaaaggccgcgttgctggcgtttttccataggctccgcccccctgacgagcatcacaaaaatcgacgctcaagtcagaggtggcgaaacccgacaggactataaagataccaggcgtttccccctggaagctccctcgtgcgctctcctgttccgaccctgccgcttaccggatacctgtccgcctttctcccttcgggaagcgtggcgctttctcatagctcacgctgtaggtatctcagttcggtgtaggtcgttcgctccaagctgggctgtgtgcacgaaccccccgttcagcccgaccgctgcgccttatccggtaactatcgtcttgagtccaacccggtaagacacgacttatcgccactggcagcagccactggtaacaggattagcagagcgaggtatgtaggcggtgctacagagttcttgaagtggtggcctaactacggctacactagaaggacagtatttggtatctgcgctctgctgaagccagttaccttcggaaaaagagttggtagctcttgatccggcaaacaaaccaccgctggtagcggtggtttttttgtttgcaagcagcagattacgcgcagaaaaaaaggatctcaagaagatcctttgatcttttctacggggtctgacgctcagtggaacgaaaactcacgttaagggattttggtcatgagattatcaaaaaggatcttcacctagatccttttaaattaaaaatgaagttttaaatcaatctaaagtatatatgagtaaacttggtctgacagttaccaatgcttaatcagtgaggcacctatctcagcgatctgtctatttcgttcatccatagttgcctgactccccgtcgtgtagataactacgatacgggagggcttaccatctggccccagtgctgcaatgataccgcgagacccacgctcaccggctccagatttatcagcaataaaccagccagccggaagggccgagcgcagaagtggtcctgcaactttatccgcctccatccagtctattaattgttgccgggaagctagagtaagtagttcgccagttaatagtttgcgcaacgttgttgccattgctacaggcatcgtggtgtcacgctcgtcgtttggtatggcttcattcagctccggttcccaacgatcaaggcgagttacatgatcccccatgttgtgcaaaaaagcggttagctccttcggtcctccgatcgttgtcagaagtaagttggccgcagtgttatcactcatggttatggcagcactgcataattctcttactgtcatgccatccgtaagatgcttttctgtgactggtgagtactcaaccaagtcattctgagaatagtgtatgcggcgaccgagttgctcttgcccggcgtcaatacgggataataccgcgccacatagcagaactttaaaagtgctcatcattggaaaacgttcttcggggcgaaaactctcaaggatcttaccgctgttgagatccagttcgatgtaacccactcgtgcacccaactgatcttcagcatcttttactttcaccagcgtttctgggtgagcaaaaacaggaaggcaaaatgccgcaaaaaagggaataagggcgacacggaaatgttgaatactcatactcttcctttttcaatattattgaagcatttatcagggttattgtctcatgagcggatacatatttgaatgtatttagaaaaataaacaaataggggttccgcgcacatttccccgaaaagtgccacctgaacgaagcatctgtgcttcattttgtagaacaaaaatgcaacgcgagagcgctaatttttcaaacaaagaatctgagctgcatttttacagaacagaaatgcaacgcgaaagcgctattttaccaacgaagaatctgtgcttcatttttgtaaaacaaaaatgcaacgcgagagcgctaatttttcaaacaaagaatctgagctgcatttttacagaacagaaatgcaacgcgagagcgctattttaccaacaaagaatctatacttcttttttgttctacaaaaatgcatcccgagagcgctatttttctaacaaagcatcttagattactttttttctcctttgtgcgctctataatgcagtctcttgataactttttgcactgtaggtccgttaaggttagaagaaggctactttggtgtctattttctcttccataaaaaaagcctgactccacttcccgcgtttactgattactagcgaagctgcgggtgcattttttcaagataaaggcatccccgattatattctataccgatgtggattgcgcatactttgtgaacagaaagtgatagcgttgatgattcttcattggtcagaaaattatgaacggtttcttctattttgtctctatatactacgtataggaaatgtttacattttcgtattgttttcgattcactctatgaatagttcttactacaatttttttgtctaaagagtaatactagagataaacataaaaaatgtagaggtcgagtttagatgcaagttcaaggagcgaaaggtggatgggtaggttatatagggatatagcacagagatatatagcaaagagatacttttgagcaatgtttgtggaagcggtattcgcaatattttagtagctcgttacagtccggtgcgtttttggttttttgaaagtgcgtcttcagagcgcttttggttttcaaaagcgctctgaagttcctatactttctagagaataggaacttcggaataggaacttcaaagcgtttccgaaaacgagcgcttccgaaaatgcaacgcgagctgcgcacatacagctcactgttcacgtcgcacctatatctgcgtgttgcctgtatatatatatacatgagaagaacggcatagtgcgtgtttatgcttaaatgcgtacttatatgcgtctatttatgtaggatgaaaggtagtctagtacctcctgtgatattatcccattccatgcggggtatcgtatgcttccttcagcactaccctttagctgttctatatgctgccactcctcaattggattagtctcatccttcaatgctatcatttcctttgatattggatcatactaagaaaccattattatcatgacattaacctataaaaataggcgtatcacgaggccctttcgtctcgcgcgtttcggtgatgacggtgaaaacctctgacacatgcagctcccggagacggtcacagcttgtctgtaagcggatgccgggagcagacaagcccgtcagggcgcgtcagcgggtgttggcgggtgtcggggctggcttaactatgcggcatcagagcagattgtactgagagtgcaccatatcgactacgtcgtaaggccgtttctgacagagtaaaattcttgagggaactttcaccattatgggaaatgcttcaagaaggtattgacttaaactccatcaaatggtcaggtcattgagtgttttttatttgttgtatttttttttttttagagaaaatcctccaatatcaaattaggaatcgtagtttcatgattttctgttacacctaactttttgtgtggtgccctcctccttgtcaatattaatgttaaagtgcaattctttttccttatcacgttgagccattagtatcaatttgcttacctgtattcctttactatcctcctttttctccttcttgataaatgtatgtagattgcgtatatagtttcgtctaccctatgaacatattccattttgtaatttcgtgtcgtttctattatgaatttcatttataaagtttatgtacaaatatcataaaaaaagagaatctttttaagcaaggattttcttaacttcttcggcgacagcatcaccgacttcggtggtactgttggaaccacctaaatcaccagttctgatacctgcatccaaaacctttttaactgcatcttcaatggccttaccttcttcaggcaagttcaatgacaatttcaacatcattgcagcagacaagatagtggcgatagggtcaaccttattctttggcaaatctggagcagaaccgtggcatggttcgtacaaaccaaatgcggtgttcttgtctggcaaagaggccaaggacgcagatggcaacaaacccaaggaacctgggataacggaggcttcatcggagatgatatcaccaaacatgttgctggtgattataataccatttaggtgggttgggttcttaactaggatcatggcggcagaatcaatcaattgatgttgaaccttcaatgtagggaattcgttcttgatggtttcctccacagtttttctccataatcttgaagaggccaaaagattagctttatccaaggaccaaataggcaatggtggctcatgttgtagggccatgaaagcggccattcttgtgattctttgcacttctggaacggtgtattgttcactatcccaagcgacaccatcaccatcgtcttcctttctcttaccaaagtaaatacctcccactaattctctgacaacaacgaagtcagtacctttagcaaattgtggcttgattggagataagtctaaaagagagtcggatgcaaagttacatggtcttaagttggcgtacaattgaagttctttacggatttttagtaaaccttgttcaggtctaacactaccggtaccccatttaggaccagccacagcacctaacaaaacggcatcaaccttcttggaggcttccagcgcctcatctggaagtgggacacctgtagcatcgatagcagcaccaccaattaaatgattttcgaaatcgaacttgacattggaacgaacatcagaaatagctttaagaaccttaatggcttcggctgtgatttcttgaccaacgtggtcacctggcaaaacgacgatcttcttaggggcagacataggggcagacattagaatggtatatccttgaaatatatatatatattgctgaaatgtaaaaggtaagaaaagttagaaagtaagacgattgctaaccacctattggaaaaaacaataggtccttaaataatattgtcaacttcaagtattgtgatgcaagcatttagtcatgaacgcttctctattctatatgaaaagccggttccggcctctcacctttcctttttctcccaatttttcagttgaaaaaggtatatgcgtcaggcgacctctgaaattaacaaaaaatttccagtcatcgaatttgattctgtgcgatagcgcccctgtgtgttctcgttatgttgaggaaaaaaataatggttgctaagagattcgaactcttgcatcttacgatacctgagtattcccacagttaactgcggtcaagatatttcttgaatcaggcgccttagaccgctcggccaaacaaccaattacttgttgagaaatagagtataattatcctataaatataacgtttttgaacacacatgaacaaggaagtacaggacaattgattttgaagagaatgtggattttgatgtaattgttgggattccatttttaataaggcaataatattaggtatgtggatatactagaagttctcctcgaccgtcgatatgcggtgtgaaataccgcacagatgcgtaaggagaaaataccgcatcaggaaattgtaaacgttaatattttgttaaaattcgcgttaaatttttgttaaatcagctcattttttaaccaataggccgaaatcggcaaaatcccttataaatcaaaagaatagaccgagatagggttgagtgttgttccagtttggaacaagagtccactattaaagaacgtggactccaacgtcaaagggcgaaaaaccgtctatcagggcgatggcccactacgtgaaccatcaccctaatcaagttttttggggtcgaggtgccgtaaagcactaaatcggaaccctaaagggagcccccgatttagagcttgacggggaaagccggcgaacgtggcgagaaaggaagggaagaaagcgaaaggagcgggcgctagggcgctggcaagtgtagcggtcacgctgcgcgtaaccaccacacccgccgcgcttaatgcgccgctacagggcgcgtcgcgccattcgccattcaggctgcgcaactgttgggaagggcgatcggtgcgggcctcttcgctattacgccagctggcgaaagggggatgtgctgcaaggcgattaagttgggtaacgccagggttttcccagtcacgacgttgtaaaacgacggccagtgagcgcgcgtaatacgactcactatagggcgaattgggtaccgggccccccctcgaggtcgacggtatcgataagcttgatatcgaattcctgcagcccgggggatccgttagaatcattttgaataaaaaacacgctttttcagttcgagtttatcattatcaatactgccatttcaaagaatacgtaaataattaatagtagtgattttcctaactttatttagtcaaaaaattagccttttaattctgctgtaacccgtacatgcccaaaatagggggcgggttacacagaatatataacatcgtaggtgtctgggtgaacagtttattcctggcatccactaaatataatggagcccgctttttaagctggcatccagaaaaaaaaagaatcccagcaccaaaatattgttttcttcaccaaccatcagttcataggtccattctcttagcgcaactacagagaacaggggcacaaacaggcaaaaaacgggcacaacctcaatggagtgatgcaacctgcctggagtaaatgatgacacaaggcaattgacccacgcatgtatctatctcattttcttacaccttctattaccttctgctctctctgatttggaaaaagctgaaaaaaaaggttgaaaccagttccctgaaattattcccctacttgactaataagtatataaagacggtaggtattgattgtaattctgtaaatctatttcttaaacttcttaaattctacttttatagttagtcttttttttagttttaaaacaccaagaacttagtttcgaataaacacacataaacaaacaaagaattc

SEQ ID NO: 733 - DNA, 9753 bp, Artificial Sequence
  Synthetic
atgaaacggacagccgacggaagcgagttcgagtcaccaaagaagaagcggaaagtcgacaagaagtacagcatcggcctggacatcggcaccaactctgtgggctgggccgtgatcaccgacgagtacaaggtgcccagcaagaaattcaaggtgctgggcaacaccgaccggcacagcatcaagaagaacctgatcggagccctgctgttcgacagcggcgaaacagccgaggccacccggctgaagagaaccgccagaagaagatacaccagacggaagaaccggatctgctatctgcaagagatcttcagcaacgagatggccaaggtggacgacagcttcttccacagactggaagagtccttcctggtggaagaggataagaagcacgagcggcaccccatcttcggcaacatcgtggacgaggtggcctaccacgagaagtaccccaccatctaccacctgagaaagaaactggtggacagcaccgacaaggccgacctgcggctgatctatctggccctggcccacatgatcaagttccggggccacttcctgatcgagggcgacctgaaccccgacaacagcgacgtggacaagctgttcatccagctggtgcagacctacaaccagctgttcgaggaaaaccccatcaacgccagcggcgtggacgccaaggccatcctgtctgccagactgagcaagagcagacggctggaaaatctgatcgcccagctgcccggcgagaagaagaatggcctgttcggaaacctgattgccctgagcctgggcctgacccccaacttcaagagcaacttcgacctggccgaggatgccaaactgcagctgagcaaggacacctacgacgacgacctggacaacctgctggcccagatcggcgaccagtacgccgacctgtttctggccgccaagaacctgtccgacgccatcctgctgagcgacatcctgagagtgaacaccgagatcaccaaggcccccctgagcgcctctatgatcaagagatacgacgagcaccaccaggacctgaccctgctgaaagctctcgtgcggcagcagctgcctgagaagtacaaagagattttcttcgaccagagcaagaacggctacgccggctacattgacggcggagccagccaggaagagttctacaagttcatcaagcccatcctggaaaagatggacggcaccgaggaactgctcgtgaagctgaacagagaggacctgctgcggaagcagcggaccttcgacaacggcagcatcccccaccagatccacctgggagagctgcacgccattctgcggcggcaggaagatttttacccattcctgaaggacaaccgggaaaagatcgagaagatcctgaccttccgcatcccctactacgtgggccctctggccaggggaaacagcagattcgcctggatgaccagaaagagcgaggaaaccatcaccccctggaacttcgaggaagtggtggacaagggcgcttccgcccagagcttcatcgagcggatgaccaacttcgataagaacctgcccaacgagaaggtgctgcccaagcacagcctgctgtacgagtacttcaccgtgtataacgagctgaccaaagtgaaatacgtgaccgagggaatgagaaagcccgccttcctgagcggcgagcagaaaaaggccatcgtggacctgctgttcaagaccaaccggaaagtgaccgtgaagcagctgaaagaggactacttcaagaaaatcgagtgcttcgactccgtggaaatctccggcgtggaagatcggttcaacgcctccctgggcacataccacgatctgctgaaaattatcaaggacaaggacttcctggacaatgaggaaaacgaggacattctggaagatatcgtgctgaccctgacactgtttgaggacagagagatgatcgaggaacggctgaaaacctatgcccacctgttcgacgacaaagtgatgaagcagctgaagcggcggagatacaccggctggggcaggctgagccggaagctgatcaacggcatccgggacaagcagtccggcaagacaatcctggatttcctgaagtccgacggcttcgccaacagaaacttcatgcagctgatccacgacgacagcctgacctttaaagaggacatccagaaagcccaggtgtccggccagggcgatagcctgcacgagcacattgccaatctggccggcagccccgccattaagaagggcatcctgcagacagtgaaggtggtggacgagctcgtgaaagtgatgggccggcacaagcccgagaacatcgtgatcgaaatggccagagagaaccagaccacccagaagggacagaagaacagccgcgagagaatgaagcggatcgaagagggcatcaaagagctgggcagccagatcctgaaagaacaccccgtggaaaacacccagctgcagaacgagaagctgtacctgtactacctgcagaatgggcgggatatgtacgtggaccaggaactggacatcaaccggctgtccgactacgatgtggacgctatcgtgcctcagagctttctgaaggacgactccatcgacaacaaggtgctgaccagaagcgacaagaaccggggcaagagcgacaacgtgccctccgaagaggtcgtgaagaagatgaagaactactggcggcagctgctgaacgccaagctgattacccagagaaagttcgacaatctgaccaaggccgagagaggcggcctgagcgaactggataaggccggcttcatcaagagacagctggtggaaacccggcagatcacaaagcacgtggcacagatcctggactcccggatgaacactaagtacgacgagaatgacaagctgatccgggaagtgaaagtgatcaccctgaagtccaagctggtgtccgatttccggaaggatttccagttttacaaagtgcgcgagatcaacaactaccaccacgcccacgacgcctacctgaacgccgtcgtgggaaccgccctgatcaaaaagtaccctaagctggaaagcgagttcgtgtacggcgactacaaggtgtacgacgtgcggaagatgatcgccaagagcgagcaggaaatcggcaaggctaccgccaagtacttcttctacagcaacatcatgaactttttcaagaccgagattaccctggccaacggcgagatccggaagcggcctctgatcgagacaaacggcgaaaccggggagatcgtgtgggataagggccgggattttgccaccgtgcggaaagtgctgagcatgccccaagtgaatatcgtgaaaaagaccgaggtgcagacaggcggcttcagcaaagagtctatcctgcccaagaggaacagcgataagctgatcgccagaaagaaggactgggaccctaagaagtacggcggcttcgacagccccaccgtggcctattctgtgctggtggtggccaaagtggaaaagggcaagtccaagaaactgaagagtgtgaaagagctgctggggatcaccatcatggaaagaagcagcttcgagaagaatcccatcgactttctggaagccaagggctacaaagaagtgaaaaaggacctgatcatcaagctgcctaagtactccctgttcgagctggaaaacggccggaagagaatgctggcctctgccggcgaactgcagaagggaaacgaactggccctgccctccaaatatgtgaacttcctgtacctggccagccactatgagaagctgaagggctcccccgaggataatgagcagaaacagctgtttgtggaacagcacaagcactacctggacgagatcatcgagcagatcagcgagttctccaagagagtgatcctggccgacgctaatctggacaaagtgctgtccgcctacaacaagcaccgggataagcccatcagagagcaggccgagaatatcatccacctgtttaccctgaccaatctgggagcccctgccgccttcaagtactttgacaccaccatcgaccggaagaggtacaccagcaccaaagaggtgctggacgccaccctgatccaccagagcatcaccggcctgtacgagacacggatcgacctgtctcagctgggaggtgactctggaggatctagcggaggatcctctggcagcgagacaccaggaacaagcgagtcagcaacaccagagagcagtggcggcagcagcggcggcagcagcaccctaaatatagaagatgagtatcggctacatgagacctcaaaagagccagatgtttctctagggtccacatggctgtctgattttcctcaggcctgggcggaaaccgggggcatgggactggcagttcgccaagctcctctgatcatacctctgaaagcaacctctacccccgtgtccataaaacaataccccatgtcacaagaagccagactggggatcaagccccacatacagagactgttggaccagggaatactggtaccctgccagtccccctggaacacgcccctgctacccgttaagaaaccagggactaatgattataggcctgtccaggatctgagagaagtcaacaagcgggtggaagacatccaccccaccgtgcccaacccttacaacctcttgagcgggctcccaccgtcccaccagtggtacactgtgcttgatttaaaggatgcctttttctgcctgagactccaccccaccagtcagcctctcttcgcctttgagtggagagatccagagatgggaatctcaggacaattgacctggaccagactcccacagggtttcaaaaacagtcccaccctgtttgatgaggcactgcacagagacctagcagacttccggatccagcacccagacttgatcctgctacagtacgtggatgacttactgctggccgccacttctgagctagactgccaacaaggtactcgggccctgttacaaaccctagggaacctcgggtatcgggcctcggccaagaaagcccaaatttgccagaaacaggtcaagtatctggggtatcttctaaaagagggtcagagatggctgactgaggccagaaaagagactgtgatggggcagcctactccgaagacccctcgacaactaagggagttcctagggacggcaggcttctgtcgcctctggatccctgggtttgcagaaatggcagcccccctgtaccctctcaccaaaacggggactctgtttaattggggcccagaccaacaaaaggcctatcaagaaatcaagcaagctcttctaactgccccagccctggggttgccagatttgactaagccctttgaactctttgtcgacgagaagcagggctacgccaaaggtgtcctaacgcaaaaactgggaccttggcgtcggccggtggcctacctgtccaaaaagctagacccagtagcagctgggtggcccccttgcctacggatggtagcagccattgccgtactgacaaaggatgcaggcaagctaaccatgggacagccactagtcattctggccccccatgcagtagaggcactagtcaaacaaccccccgaccgctggctttccaacgcccggatgactcactatcaggccttgcttttggacacggaccgggtccagttcggaccggtggtagccctgaacccggctacgctgctcccactgcctgaggaagggctgcaacacaactgccttgatatcctggccgaagcccacggaacccgacccgacctaacggaccagccgctcccagacgccgaccacacctggtacacggatggaagcagtctcttacaagagggacagcgtaaggcgggagctgcggtgaccaccgagaccgaggtaatctgggctaaagccctgccagccgggacatccgctcagcgggctgaactgatagcactcacccaggccctaaagatggcagaaggtaagaagctaaatgtttatactgatagccgttatgcttttgctactgcccatatccatggagaaatatacagaaggcgtgggttgctcacatcagaaggcaaagagatcaaaaataaagacgagatcttggccctactaaaagccctctttctgcccaaaagacttagcataatccattgtccaggacatcaaaagggacacagcgccgaggctagaggcaaccggatggctgaccaagcggcccgaaaggcagccatcacagagactccagacacctctaccctcctcatagaaaattcatcaccctctggcggctcaaaaagaaccgccgacggcagcgaattcgagcccaagaagaagaggaaagtctaaccggtcatcatcaccatcaccattgagtttaaacccgctgatcagcctcgactgtgccttctagttgccagccatctgttgtttgcccctcccccgtgccttccttgaccctggaaggtgccactcccactgtcctttcctaataaaatgagaaaattgcatcgcattgtctgagtaggtgtcattctattctggggggtggggtggggcaggacagcaagggggaggattgggaagacaatagcaggcatgctggggatgcggtgggctctatggcttctgaggcggaaagaaccagctggggctcgataccgtcgacctctagctagagcttggcgtaatcatggtcatagctgtttcctgtgtgaaattgttatccgctcacaattccacacaacatacgagccggaagcataaagtgtaaagcctagggtgcctaatgagtgagctaactcacattaattgcgttgcgctcactgcccgctttccagtcgggaaacctgtcgtgccagctgcattaatgaatcggccaacgcgcggggagaggcggtttgcgtattgggcgctcttccgcttcctcgctcactgactcgctgcgctcggtcgttcggctgcggcgagcggtatcagctcactcaaaggcggtaatacggttatccacagaatcaggggataacgcaggaaagaacatgtgagcaaaaggccagcaaaaggccaggaaccgtaaaaaggccgcgttgctggcgtttttccataggctccgcccccctgacgagcatcacaaaaatcgacgctcaagtcagaggtggcgaaacccgacaggactataaagataccaggcgtttccccctggaagctccctcgtgcgctctcctgttccgaccctgccgcttaccggatacctgtccgcctttctcccttcgggaagcgtggcgctttctcatagctcacgctgtaggtatctcagttcggtgtaggtcgttcgctccaagctgggctgtgtgcacgaaccccccgttcagcccgaccgctgcgccttatccggtaactatcgtcttgagtccaacccggtaagacacgacttatcgccactggcagcagccactggtaacaggattagcagagcgaggtatgtaggcggtgctacagagttcttgaagtggtggcctaactacggctacactagaagaacagtatttggtatctgcgctctgctgaagccagttaccttcggaaaaagagttggtagctcttgatccggcaaacaaaccaccgctggtagcggtggtttttttgtttgcaagcagcagattacgcgcagaaaaaaaggatctcaagaagatcctttgatcttttctacggggtctgacgctcagtggaacgaaaactcacgttaagggattttggtcatgagattatcaaaaaggatcttcacctagatccttttaaattaaaaatgaagttttaaatcaatctaaagtatatatgagtaaacttggtctgacagttaccaatgcttaatcagtgaggcacctatctcagcgatctgtctatttcgttcatccatagttgcctgactccccgtcgtgtagataactacgatacgggagggcttaccatctggccccagtgctgcaatgataccgcgagacccacgctcaccggctccagatttatcagcaataaaccagccagccggaagggccgagcgcagaagtggtcctgcaactttatccgcctccatccagtctattaattgttgccgggaagctagagtaagtagttcgccagttaatagtttgcgcaacgttgttgccattgctacaggcatcgtggtgtcacgctcgtcgtttggtatggcttcattcagctccggttcccaacgatcaaggcgagttacatgatcccccatgttgtgcaaaaaagcggttagctccttcggtcctccgatcgttgtcagaagtaagttggccgcagtgttatcactcatggttatggcagcactgcataattctcttactgtcatgccatccgtaagatgcttttctgtgactggtgagtactcaaccaagtcattctgagaatagtgtatgcggcgaccgagttgctcttgcccggcgtcaatacgggataataccgcgccacatagcagaactttaaaagtgctcatcattggaaaacgttcttcggggcgaaaactctcaaggatcttaccgctgttgagatccagttcgatgtaacccactcgtgcacccaactgatcttcagcatcttttactttcaccagcgtttctgggtgagcaaaaacaggaaggcaaaatgccgcaaaaaagggaataagggcgacacggaaatgttgaatactcatactcttcctttttcaatattattgaagcatttatcagggttattgtctcatgagcggatacatatttgaatgtatttagaaaaataaacaaataggggttccgcgcacatttccccgaaaagtgccacctgacgtcgacggatcgggagatcgatctcccgatcccctagggtcgactctcagtacaatctgctctgatgccgcatagttaagccagtatctgctccctgcttgtgtgttggaggtcgctgagtagtgcgcgagcaaaatttaagctacaacaaggcaaggcttgaccgacaattgcatgaagaatctgcttagggttaggcgttttgcgctgcttcgcgatgtacgggccagatatacgcgttgacattgattattgactagttattaatagtaatcaattacggggtcattagttcatagcccatatatggagttccgcgttacataacttacggtaaatggcccgcctggctgaccgcccaacgacccccgcccattgacgtcaataatgacgtatgttcccatagtaacgccaatagggactttccattgacgtcaatgggtggagtatttacggtaaactgcccacttggcagtacatcaagtgtatcatatgccaagtacgccccctattgacgtcaatgacggtaaatggcccgcctggcattatgcccagtacatgaccttatgggactttcctacttggcagtacatctacgtattagtcatcgctattaccatggtgatgcggttttggcagtacatcaatgggcgtggatagcggtttgactcacggggatttccaagtctccaccccattgacgtcaatgggagtttgttttggcaccaaaatcaacgggactttccaaaatgtcgtaacaactccgccccattgacgcaaatgggcggtaggcgtgtacggtgggaggtctatataagcagagctggtttagtgaaccgtcagatccgctagagatccgcggccgctaatacgactcactatagggagagccgccacc

SEQ ID NO: 734 - DNA, 9753 bp, Artificial Sequence
  Synthetic
atgaaacggacagccgacggaagcgagttcgagtcaccaaagaagaagcggaaagtcgacaagaagtacagcatcggcctggacatcggcaccaactctgtgggctgggccgtgatcaccgacgagtacaaggtgcccagcaagaaattcaaggtgctgggcaacaccgaccggcacagcatcaagaagaacctgatcggagccctgctgttcgacagcggcgaaacagccgaggccacccggctgaagagaaccgccagaagaagatacaccagacggaagaaccggatctgctatctgcaagagatcttcagcaacgagatggccaaggtggacgacagcttcttccacagactggaagagtccttcctggtggaagaggataagaagcacgagcggcaccccatcttcggcaacatcgtggacgaggtggcctaccacgagaagtaccccaccatctaccacctgagaaagaaactggtggacagcaccgacaaggccgacctgcggctgatctatctggccctggcccacatgatcaagttccggggccacttcctgatcgagggcgacctgaaccccgacaacagcgacgtggacaagctgttcatccagctggtgcagacctacaaccagctgttcgaggaaaaccccatcaacgccagcggcgtggacgccaaggccatcctgtctgccagactgagcaagagcagacggctggaaaatctgatcgcccagctgcccggcgagaagaagaatggcctgttcggaaacctgattgccctgagcctgggcctgacccccaacttcaagagcaacttcgacctggccgaggatgccaaactgcagctgagcaaggacacctacgacgacgacctggacaacctgctggcccagatcggcgaccagtacgccgacctgtttctggccgccaagaacctgtccgacgccatcctgctgagcgacatcctgagagtgaacaccgagatcaccaaggcccccctgagcgcctctatgatcaagagatacgacgagcaccaccaggacctgaccctgctgaaagctctcgtgcggcagcagctgcctgagaagtacaaagagattttcttcgaccagagcaagaacggctacgccggctacattgacggcggagccagccaggaagagttctacaagttcatcaagcccatcctggaaaagatggacggcaccgaggaactgctcgtgaagctgaacagagaggacctgctgcggaagcagcggaccttcgacaacggcagcatcccccaccagatccacctgggagagctgcacgccattctgcggcggcaggaagatttttacccattcctgaaggacaaccgggaaaagatcgagaagatcctgaccttccgcatcccctactacgtgggccctctggccaggggaaacagcagattcgcctggatgaccagaaagagcgaggaaaccatcaccccctggaacttcgaggaagtggtggacaagggcgcttccgcccagagcttcatcgagcggatgaccaacttcgataagaacctgcccaacgagaaggtgctgcccaagcacagcctgctgtacgagtacttcaccgtgtataacgagctgaccaaagtgaaatacgtgaccgagggaatgagaaagcccgccttcctgagcggcgagcagaaaaaggccatcgtggacctgctgttcaagaccaaccggaaagtgaccgtgaagcagctgaaagaggactacttcaagaaaatcgagtgcttcgactccgtggaaatctccggcgtggaagatcggttcaacgcctccctgggcacataccacgatctgctgaaaattatcaaggacaaggacttcctggacaatgaggaaaacgaggacattctggaagatatcgtgctgaccctgacactgtttgaggacagagagatgatcgaggaacggctgaaaacctatgcccacctgttcgacgacaaagtgatgaagcagctgaagcggcggagatacaccggctggggcaggctgagccggaagctgatcaacggcatccgggacaagcagtccggcaagacaatcctggatttcctgaagtccgacggcttcgccaacagaaacttcatgcagctgatccacgacgacagcctgacctttaaagaggacatccagaaagcccaggtgtccggccagggcgatagcctgcacgagcacattgccaatctggccggcagccccgccattaagaagggcatcctgcagacagtgaaggtggtggacgagctcgtgaaagtgatgggccggcacaagcccgagaacatcgtgatcgaaatggccagagagaaccagaccacccagaagggacagaagaacagccgcgagagaatgaagcggatcgaagagggcatcaaagagctgggcagccagatcctgaaagaacaccccgtggaaaacacccagctgcagaacgagaagctgtacctgtactacctgcagaatgggcgggatatgtacgtggaccaggaactggacatcaaccggctgtccgactacgatgtggacgctatcgtgcctcagagctttctgaaggacgactccatcgacaacaaggtgctgaccagaagcgacaagaaccggggcaagagcgacaacgtgccctccgaagaggtcgtgaagaagatgaagaactactggcggcagctgctgaacgccaagctgattacccagagaaagttcgacaatctgaccaaggccgagagaggcggcctgagcgaactggataaggccggcttcatcaagagacagctggtggaaacccggcagatcacaaagcacgtggcacagatcctggactcccggatgaacactaagtacgacgagaatgacaagctgatccgggaagtgaaagtgatcaccctgaagtccaagctggtgtccgatttccggaaggatttccagttttacaaagtgcgcgagatcaacaactaccaccacgcccacgacgcctacctgaacgccgtcgtgggaaccgccctgatcaaaaagtaccctaagctggaaagcgagttcgtgtacggcgactacaaggtgtacgacgtgcggaagatgatcgccaagagcgagcaggaaatcggcaaggctaccgccaagtacttcttctacagcaacatcatgaactttttcaagaccgagattaccctggccaacggcgagatccggaagcggcctctgatcgagacaaacggcgaaaccggggagatcgtgtgggataagggccgggattttgccaccgtgcggaaagtgctgagcatgccccaagtgaatatcgtgaaaaagaccgaggtgcagacaggcggcttcagcaaagagtctatcctgcccaagaggaacagcgataagctgatcgccagaaagaaggactgggaccctaagaagtacggcggcttcgacagccccaccgtggcctattctgtgctggtggtggccaaagtggaaaagggcaagtccaagaaactgaagagtgtgaaagagctgctggggatcaccatcatggaaagaagcagcttcgagaagaatcccatcgactttctggaagccaagggctacaaagaagtgaaaaaggacctgatcatcaagctgcctaagtactccctgttcgagctggaaaacggccggaagagaatgctggcctctgccggcgaactgcagaagggaaacgaactggccctgccctccaaatatgtgaacttcctgtacctggccagccactatgagaagctgaagggctcccccgaggataatgagcagaaacagctgtttgtggaacagcacaagcactacctggacgagatcatcgagcagatcagcgagttctccaagagagtgatcctggccgacgctaatctggacaaagtgctgtccgcctacaacaagcaccgggataagcccatcagagagcaggccgagaatatcatccacctgtttaccctgaccaatctgggagcccctgccgccttcaagtactttgacaccaccatcgaccggaagaggtacaccagcaccaaagaggtgctggacgccaccctgatccaccagagcatcaccggcctgtacgagacacggatcgacctgtctcagctgggaggtgactctggaggatctagcggaggatcctctggcagcgagacaccaggaacaagcgagtcagcaacaccagagagcagtggcggcagcagcggcggcagcagcaccctaaatatagaagatgagtatcggctacatgagacctcaaaagagccagatgtttctctagggtccacatggctgtctgattttcctcaggcctgggcggaaaccgggggcatgggactggcagttcgccaagctcctctgatcatacctctgaaagcaacctctacccccgtgtccataaaacaataccccatgtcacaagaagccagactggggatcaagccccacatacagagactgttggaccagggaatactggtaccctgccagtccccctggaacacgcccctgctacccgttaagaaaccagggactaatgattataggcctgtccaggatctgagagaagtcaacaagcgggtggaagacatccaccccaccgtgcccaacccttacaacctcttgagcgggctcccaccgtcccaccagtggtacactgtgcttgatttaaaggatgcctttttctgcctgagactccaccccaccagtcagcctctcttcgcctttgagtggagagatccagagatgggaatctcaggacaattgacctggaccagactcccacagggtttcaaaaacagtcccaccctgtttaatgaggcactgcacagagacctagcagacttccggatccagcacccagacttgatcctgctacagtacgtggatgacttactgctggccgccacttctgagctagactgccaacaaggtactcgggccctgttacaaaccctagggaacctcgggtatcgggcctcggccaagaaagcccaaatttgccagaaacaggtcaagtatctggggtatcttctaaaagagggtcagagatggctgactgaggccagaaaagagactgtgatggggcagcctactccgaagacccctcgacaactaagggagttcctagggaaggcaggcttctgtcgcctcttcatccctgggtttgcagaaatggcagcccccctgtaccctctcaccaaaccggggactctgtttaattggggcccagaccaacaaaaggcctatcaagaaatcaagcaagctcttctaactgccccagccctggggttgccagatttgactaagccctttgaactctttgtcgacgagaagcagggctacgccaaaggtgtcctaacgcaaaaactgggaccttggcgtcggccggtggcctacctgtccaaaaagctagacccagtagcagctgggtggcccccttgcctacggatggtagcagccattgccgtactgacaaaggatgcaggcaagctaaccatgggacagccactagtcattctggccccccatgcagtagaggcactagtcaaacaaccccccgaccgctggctttccaacgcccggatgactcactatcaggccttgcttttggacacggaccgggtccagttcggaccggtggtagccctgaacccggctacgctgctcccactgcctgaggaagggctgcaacacaactgccttgatatcctggccgaagcccacggaacccgacccgacctaacggaccagccgctcccagacgccgaccacacctggtacacggatggaagcagtctcttacaagagggacagcgtaaggcgggagctgcggtgaccaccgagaccgaggtaatctgggctaaagccctgccagccgggacatccgctcagcgggctgaactgatagcactcacccaggccctaaagatggcagaaggtaagaagctaaatgtttatactgatagccgttatgcttttgctactgcccatatccatggagaaatatacagaaggcgtgggtggctcacatcagaaggcaaagagatcaaaaataaagacgagatcttggccctactaaaagccctctttctgcccaaaagacttagcataatccattgtccaggacatcaaaagggacacagcgccgaggctagaggcaaccggatggctgaccaagcggcccgaaaggcagccatcacagagactccagacacctctaccctcctcatagaaaattcatcaccctctggcggctcaaaaagaaccgccgacggcagcgaattcgagcccaagaagaagaggaaagtctaaccggtcatcatcaccatcaccattgagtttaaacccgctgatcagcctcgactgtgccttctagttgccagccatctgttgtttgcccctcccccgtgccttccttgaccctggaaggtgccactcccactgtcctttcctaataaaatgagaaaattgcatcgcattgtctgagtaggtgtcattctattctggggggtggggtggggcaggacagcaagggggaggattgggaagacaatagcaggcatgctggggatgcggtgggctctatggcttctgaggcggaaagaaccagctggggctcgataccgtcgacctctagctagagcttggcgtaatcatggtcatagctgtttcctgtgtgaaattgttatccgctcacaattccacacaacatacgagccggaagcataaagtgtaaagcctagggtgcctaatgagtgagctaactcacattaattgcgttgcgctcactgcccgctttccagtcgggaaacctgtcgtgccagctgcattaatgaatcggccaacgcgcggggagaggcggtttgcgtattgggcgctcttccgcttcctcgctcactgactcgctgcgctcggtcgttcggctgcggcgagcggtatcagctcactcaaaggcggtaatacggttatccacagaatcaggggataacgcaggaaagaacatgtgagcaaaaggccagcaaaaggccaggaaccgtaaaaaggccgcgttgctggcgtttttccataggctccgcccccctgacgagcatcacaaaaatcgacgctcaagtcagaggtggcgaaacccgacaggactataaagataccaggcgtttccccctggaagctccctcgtgcgctctcctgttccgaccctgccgcttaccggatacctgtccgcctttctcccttcgggaagcgtggcgctttctcatagctcacgctgtaggtatctcagttcggtgtaggtcgttcgctccaagctgggctgtgtgcacgaaccccccgttcagcccgaccgctgcgccttatccggtaactatcgtcttgagtccaacccggtaagacacgacttatcgccactggcagcagccactggtaacaggattagcagagcgaggtatgtaggcggtgctacagagttcttgaagtggtggcctaactacggctacactagaagaacagtatttggtatctgcgctctgctgaagccagttaccttcggaaaaagagttggtagctcttgatccggcaaacaaaccaccgctggtagcggtggtttttttgtttgcaagcagcagattacgcgcagaaaaaaaggatctcaagaagatcctttgatcttttctacggggtctgacgctcagtggaacgaaaactcacgttaagggattttggtcatgagattatcaaaaaggatcttcacctagatccttttaaattaaaaatgaagttttaaatcaatctaaagtatatatgagtaaacttggtctgacagttaccaatgcttaatcagtgaggcacctatctcagcgatctgtctatttcgttcatccatagttgcctgactccccgtcgtgtagataactacgatacgggagggcttaccatctggccccagtgctgcaatgataccgcgagacccacgctcaccggctccagatttatcagcaataaaccagccagccggaagggccgagcgcagaagtggtcctgcaactttatccgcctccatccagtctattaattgttgccgggaagctagagtaagtagttcgccagttaatagtttgcgcaacgttgttgccattgctacaggcatcgtggtgtcacgctcgtcgtttggtatggcttcattcagctccggttcccaacgatcaaggcgagttacatgatcccccatgttgtgcaaaaaagcggttagctccttcggtcctccgatcgttgtcagaagtaagttggccgcagtgttatcactcatggttatggcagcactgcataattctcttactgtcatgccatccgtaagatgcttttctgtgactggtgagtactcaaccaagtcattctgagaatagtgtatgcggcgaccgagttgctcttgcccggcgtcaatacgggataataccgcgccacatagcagaactttaaaagtgctcatcattggaaaacgttcttcggggcgaaaactctcaaggatcttaccgctgttgagatccagttcgatgtaacccactcgtgcacccaactgatcttcagcatcttttactttcaccagcgtttctgggtgagcaaaaacaggaaggcaaaatgccgcaaaaaagggaataagggcgacacggaaatgttgaatactcatactcttcctttttcaatattattgaagcatttatcagggttattgtctcatgagcggatacatatttgaatgtatttagaaaaataaacaaataggggttccgcgcacatttccccgaaaagtgccacctgacgtcgacggatcgggagatcgatctcccgatcccctagggtcgactctcagtacaatctgctctgatgccgcatagttaagccagtatctgctccctgcttgtgtgttggaggtcgctgagtagtgcgcgagcaaaatttaagctacaacaaggcaaggcttgaccgacaattgcatgaagaatctgcttagggttaggcgttttgcgctgcttcgcgatgtacgggccagatatacgcgttgacattgattattgactagttattaatagtaatcaattacggggtcattagttcatagcccatatatggagttccgcgttacataacttacggtaaatggcccgcctggctgaccgcccaacgacccccgcccattgacgtcaataatgacgtatgttcccatagtaacgccaatagggactttccattgacgtcaatgggtggagtatttacggtaaactgcccacttggcagtacatcaagtgtatcatatgccaagtacgccccctattgacgtcaatgacggtaaatggcccgcctggcattatgcccagtacatgaccttatgggactttcctacttggcagtacatctacgtattagtcatcgctattaccatggtgatgcggttttggcagtacatcaatgggcgtggatagcggtttgactcacggggatttccaagtctccaccccattgacgtcaatgggagtttgttttggcaccaaaatcaacgggactttccaaaatgtcgtaacaactccgccccattgacgcaaatgggcggtaggcgtgtacggtgggaggtctatataagcagagctggtttagtgaaccgtcagatccgctagagatccgcggccgctaatacgactcactatagggagagccgccacc

SEQ ID NO: 735 - DNA, 2305 bp, Artificial Sequence
  Synthetic
gagggcctatttcccatgattccttcatatttgcatatacgatacaaggctgttagagagataattagaattaatttgactgtaaacacaaagatattagtacaaaatacgtgacgtagaaagtaataatttcttgggtagtttgcagttttaaaattatgttttaaaatggactatcatatgcttaccgtaacttgaaagtatttcgatttcttggctttatatatcttgtggaaaggacgaaacaccggcccagactgagcacgtgagttttagagctagaaatagcaagttaaaataaggctagtccgttatcaacttgaaaaagtgggaccgagtcggtcctctgccatcaaagcgtgctcagtctgtttttttaagcttgggccgctcgaggtacctctctacatatgacatgtgagcaaaaggccagcaaaaggccaggaaccgtaaaaaggccgcgttgctggcgtttttccataggctccgcccccctgacgagcatcacaaaaatcgacgctcaagtcagaggtggcgaaacccgacaggactataaagataccaggcgtttccccctggaagctccctcgtgcgctctcctgttccgaccctgccgcttaccggatacctgtccgcctttctcccttcgggaagcgtggcgctttctcatagctcacgctgtaggtatctcagttcggtgtaggtcgttcgctccaagctgggctgtgtgcacgaaccccccgttcagcccgaccgctgcgccttatccggtaactatcgtcttgagtccaacccggtaagacacgacttatcgccactggcagcagccactggtaacaggattagcagagcgaggtatgtaggcggtgctacagagttcttgaagtggtggcctaactacggctacactagaagaacagtatttggtatctgcgctctgctgaagccagttaccttcggaaaaagagttggtagctcttgatccggcaaacaaaccaccgctggtagcggtggtttttttgtttgcaagcagcagattacgcgcagaaaaaaaggatctcaagaagatcctttgatcttttctacggggtctgacgctcagtggaacgaaaactcacgttaagggattttggtcatgagattatcaaaaaggatcttcacctagatccttttaaattaaaaatgaagttttaaatcaatctaaagtatatatgagtaaacttggtctgacagttaccaatgcttaatcagtgaggcacctatctcagcgatctgtctatttcgttcatccatagttgcctgactccccgtcgtgtagataactacgatacgggagggcttaccatctggccccagtgctgcaatgataccgcgagacccacgctcaccggctccagatttatcagcaataaaccagccagccggaagggccgagcgcagaagtggtcctgcaactttatccgcctccatccagtctattaattgttgccgggaagctagagtaagtagttcgccagttaatagtttgcgcaacgttgttgccattgctacaggcatcgtggtgtcacgctcgtcgtttggtatggcttcattcagctccggttcccaacgatcaaggcgagttacatgatcccccatgttgtgcaaaaaagcggttagctccttcggtcctccgatcgttgtcagaagtaagttggccgcagtgttatcactcatggttatggcagcactgcataattctcttactgtcatgccatccgtaagatgcttttctgtgactggtgagtactcaaccaagtcattctgagaatagtgtatgcggcgaccgagttgctcttgcccggcgtcaatacgggataataccgcgccacatagcagaactttaaaagtgctcatcattggaaaacgttcttcggggcgaaaactctcaaggatcttaccgctgttgagatccagttcgatgtaacccactcgtgcacccaactgatcttcagcatcttttactttcaccagcgtttctgggtgagcaaaaacaggaaggcaaaatgccgcaaaaaagggaataagggcgacacggaaatgttgaatactcatactcttcctttttcaatattattgaagcatttatcagggttattgtctcatgagcggatacatatttgaatgtatttagaaaaataaacaaataggggttccgcgcacatttccccgaaaagtgccacctgacgtcgctagctgtacaaaaaagcaggctttaaaggaaccaattcagtcgactggatccggtaccaaggtcgggcaggaa

SEQ ID NO: 736 - DNA, 11591 bp, Artificial Sequence
  Synthetic
gtcgacggatcgggagatctcccgatcccctatggtgcactctcagtacaatctgctctgatgccgcatagttaagccagtatctgctccctgcttgtgtgttggaggtcgctgagtagtgcgcgagcaaaatttaagctacaacaaggcaaggcttgaccgacaattgcatgaagaatctgcttagggttaggcgttttgcgctgcttcgcgatgtacgggccagatatacgcgttgacattgattattgactagttattaatagtaatcaattacggggtcattagttcatagcccatatatggagttccgcgttacataacttacggtaaatggcccgcctggctgaccgcccaacgacccccgcccattgacgtcaataatgacgtatgttcccatagtaacgccaatagggactttccattgacgtcaatgggtggagtatttacggtaaactgcccacttggcagtacatcaagtgtatcatatgccaagtacgccccctattgacgtcaatgacggtaaatggcccgcctggcattatgcccagtacatgaccttatgggactttcctacttggcagtacatctacgtattagtcatcgctattaccatggtgatgcggttttggcagtacatcaatgggcgtggatagcggtttgactcacggggatttccaagtctccaccccattgacgtcaatgggagtttgttttggcaccaaaatcaacgggactttccaaaatgtcgtaacaactccgccccattgacgcaaatgggcggtaggcgtgtacggtgggaggtctatataagcagcgcgttttgcctgtactgggtctctctggttagaccagatctgagcctgggagctctctggctaactagggaacccactgcttaagcctcaataaagcttgccttgagtgcttcaagtagtgtgtgcccgtctgttgtgtgactctggtaactagagatccctcagacccttttagtcagtgtggaaaatctctagcagtggcgcccgaacagggacttgaaagcgaaagggaaaccagaggagctctctcgacgcaggactcggcttgctgaagcgcgcacggcaagaggcgaggggcggcgactggtgagtacgccaaaaattttgactagcggaggctagaaggagagagatgggtgcgagagcgtcagtattaagcgggggagaattagatcgcgatgggaaaaaattcggttaaggccagggggaaagaaaaaatataaattaaaacatatagtatgggcaagcagggagctagaacgattcgcagttaatcctggcctgttagaaacatcagaaggctgtagacaaatactgggacagctacaaccatcccttcagacaggatcagaagaacttagatcattatataatacagtagcaaccctctattgtgtgcatcaaaggatagagataaaagacaccaaggaagctttagacaagatagaggaagagcaaaacaaaagtaagaccaccgcacagcaagcggccgctgatcttcagacctggaggaggagatatgagggacaattggagaagtgaattatataaatataaagtagtaaaaattgaaccattaggagtagcacccaccaaggcaaagagaagagtggtgcagagagaaaaaagagcagtgggaataggagctttgttccttgggttcttgggagcagcaggaagcactatgggcgcagcgtcaatgacgctgacggtacaggccagacaattattgtctggtatagtgcagcagcagaacaatttgctgagggctattgaggcgcaacagcatctgttgcaactcacagtctggggcatcaagcagctccaggcaagaatcctggctgtggaaagatacctaaaggatcaacagctcctggggatttggggttgctctggaaaactcatttgcaccactgctgtgccttggaatgctagttggagtaataaatctctggaacagatttggaatcacacgacctggatggagtgggacagagaaattaacaattacacaagcttaatacactccttaattgaagaatcgcaaaaccagcaagaaaagaatgaacaagaattattggaattagataaatgggcaagtttgtggaattggtttaacataacaaattggctgtggtatataaaattattcataatgatagtaggaggcttggtaggtttaagaatagtttttgctgtactttctatagtgaatagagttaggcagggatattcaccattatcgtttcagacccacctcccaaccccgaggggacccgacaggcccgaaggaatagaagaagaaggtggagagagagacagagacagatccattcgattagtgaacggatcggcactgcgtgcgccaattctgcagacaaatggcagtattcatccacaattttaaaagaaaaggggggattggggggtacagtgcaggggaaagaatagtagacataatagcaacagacatacaaactaaagaattacaaaaacaaattacaaaaattcaaaattttcgggtttattacagggacagcagagatccagtttggttaattaaggtaccaaggtcgggcaggaagagggcctatttcccatgattccttcatatttgcatatacgatacaaggctgttagagagataattagaattaatttgactgtaaacacaaagatattagtacaaaatacgtgacgtagaaagtaataatttcttgggtagtttgcagttttaaaattatgttttaaaatggactatcatatgcttaccgtaacttgaaagtatttcgatttcttggctttatatatcttgtggaaaggacgaaacaccgcgggctggagctgttcgcgcgttttagagctagaaatagcaagttaaaataaggctagtccgttatcaacttgaaaaagtggcaccgagtcggtgcaagatgcaagcgcgaacagctccagtttttttgaattcagtgcaagtgggttttaggaccaggatgaggcggggtgggggtgcctacctgacgaccgaccccgacccactggacaagcacccaacccccattccccaaattgcgcatcccctatcagagagggggaggggaaacaggatgcggcgaggcgcgtgcgcactgccagcttcagcaccgcggacagtgccttcgcccccgcctggcggcgcgcgccaccgccgcctcagcactgaaggcgcgctgacgtcactcgccggtcccccgcaaactccccttcccggccaccttggtcgcgtccgcgccgccgccggcccagccggaccgcaccacgcgaggcgcgagataggggggcacgggcgcgaccatctgcgctgcggcgccggcgactcagcgctgcctcagtctgcggtgggcagcggaggagtcgtgtcgtgcctgagagcgcagtcgagaatctagagcgctgccaccatgaaacggacagccgacggaagcgagttcgagtcaccaaagaagaagcggaaagtcgacaagaagtacagcatcggcctggacatcggcaccaactctgtgggctgggccgtgatcaccgacgagtacaaggtgcccagcaagaaattcaaggtgctgggcaacaccgaccggcacagcatcaagaagaacctgatcggagccctgctgttcgacagcggcgaaacagccgaggccacccggctgaagagaaccgccagaagaagatacaccagacggaagaaccggatctgctatctgcaagagatcttcagcaacgagatggccaaggtggacgacagcttcttccacagactggaagagtccttcctggtggaagaggataagaagcacgagcggcaccccatcttcggcaacatcgtggacgaggtggcctaccacgagaagtaccccaccatctaccacctgagaaagaaactggtggacagcaccgacaaggccgacctgcggctgatctatctggccctggcccacatgatcaagttccggggccacttcctgatcgagggcgacctgaaccccgacaacagcgacgtggacaagctgttcatccagctggtgcagacctacaaccagctgttcgaggaaaaccccatcaacgccagcggcgtggacgccaaggccatcctgtctgccagactgagcaagagcagacggctggaaaatctgatcgcccagctgcccggcgagaagaagaatggcctgttcggaaacctgattgccctgagcctgggcctgacccccaacttcaagagcaacttcgacctggccgaggatgccaaactgcagctgagcaaggacacctacgacgacgacctggacaacctgctggcccagatcggcgaccagtacgccgacctgtttctggccgccaagaacctgtccgacgccatcctgctgagcgacatcctgagagtgaacaccgagatcaccaaggcccccctgagcgcctctatgatcaagagatacgacgagcaccaccaggacctgaccctgctgaaagctctcgtgcggcagcagctgcctgagaagtacaaagagattttcttcgaccagagcaagaacggctacgccggctacattgacggcggagccagccaggaagagttctacaagttcatcaagcccatcctggaaaagatggacggcaccgaggaactgctcgtgaagctgaacagagaggacctgctgcggaagcagcggaccttcgacaacggcagcatcccccaccagatccacctgggagagctgcacgccattctgcggcggcaggaagatttttacccattcctgaaggacaaccgggaaaagatcgagaagatcctgaccttccgcatcccctactacgtgggccctctggccaggggaaacagcagattcgcctggatgaccagaaagagcgaggaaaccatcaccccctggaacttcgaggaagtggtggacaagggcgcttccgcccagagcttcatcgagcggatgaccaacttcgataagaacctgcccaacgagaaggtgctgcccaagcacagcctgctgtacgagtacttcaccgtgtataacgagctgaccaaagtgaaatacgtgaccgagggaatgagaaagcccgccttcctgagcggcgagcagaaaaaggccatcgtggacctgctgttcaagaccaaccggaaagtgaccgtgaagcagctgaaagaggactacttcaagaaaatcgagtgcctgtcctacgagacagagatcctgacagtggagtatggcctgctgccaatcggcaagatcgtggagaagaggatcgagtgtaccgtgtactctgtggataacaatggcaacatctatacacagcccgtggcacagtggcacgataggggagagcaggaggtgttcgagtattgcctggaggacggcagcctgatcagggcaaccaaggaccacaagttcatgacagtggatggccagatgctgcccatcgacgagattttcgagcgggagctggacctgatgagagtggataacctgcctaatagcggaggcagtaaaagaacagcagacgggagtgagtttgagcccaagaaaaagagaaaggtgggatccggcgcaacaaacttctctctgctgaaacaagccggagatgtcgaagagaatcctggaccggtgagcaagggcgaggagctgttcaccggggtggtgcccatcctggtcgagctggacggcgacgtaaacggccacaagttcagcgtgtccggcgagggcgagggcgatgccacctacggcaagctgaccctgaagttcatctgcaccaccggcaagctgcccgtgccctggcccaccctcgtgaccaccctgacctacggcgtgcagtgcttcagccgctaccccgaccacatgaagcagcacgacttcttcaagtccgccatgcccgaaggctacgtccaggagcgcaccatcttcttcaaggacgacggcaactacaagacccgcgccgaggtgaagttcgagggcgacaccctggtgaaccgcatcgagctgaagggcatcgacttcaaggaggacggcaacatcctggggcacaagctggagtacaactacaacagccacaacgtctatatcatggccgacaagcagaagaacggcatcaaggtgaacttcaagatccgccacaacatcgaggacggcagcgtgcagctcgccgaccactaccagcagaacacccccatcggcgacggccccgtgctgctgcccgacaaccactacctgagcacccagtccgccctgagcaaagaccccaacgagaagcgcgatcacatggtcctgctggagttcgtgaccgccgccgggatcactctcggcatggacgagctgtacaagtccggactcagatctcgagaggaggaggaggagacagacagcaggatgccccacctcgacagccccggcagctcccagccgagacgctccttcctctcaagggtgatcagggcagcgctaccgttgcagctgcttctgctgctgctgctgctcctggcctgcctgctacctgcctctgaagatgactacagctgcacccaggccaacaactttgcccgatccttctaccccatgctgcggtacaccaacgggccacctcccacctaaacgcgttaagtcgacaatcaacctctggattacaaaatttgtgaaagattgactggtattcttaactatgttgctccttttacgctatgtggatacgctgctttaatgcctttgtatcatgctattgcttcccgtatggctttcattttctcctccttgtataaatcctggttgctgtctctttatgaggagttgtggcccgttgtcaggcaacgtggcgtggtgtgcactgtgtttgctgacgcaacccccactggttggggcattgccaccacctgtcagctcctttccgggactttcgctttccccctccctattgccacggcggaactcatcgccgcctgccttgcccgctgctggacaggggctcggctgttgggcactgacaattccgtggtgttgtcggggaaatcatcgtcctttccttggctgctcgcctgtgttgccacctggattctgcgcgggacgtccttctgctacgtcccttcggccctcaatccagcggaccttccttcccgcggcctgctgccggctctgcggcctcttccgcgtcttcgccttcgccctcagacgagtcggatctccctttgggccgcctccccgcgtcgactttaagaccaatgacttacaaggcagctgtagatcttagccactttttaaaagaaaaggggggactggaagggctaattcactcccaacgaagacaagatctgctttttgcttgtactgggtctctctggttagaccagatctgagcctgggagctctctggctaactagggaacccactgcttaagcctcaataaagcttgccttgagtgcttcaagtagtgtgtgcccgtctgttgtgtgactctggtaactagagatccctcagacccttttagtcagtgtggaaaatctctagcagggcccgtttaaacccgctgatcagcctcgactgtgccttctagttgccagccatctgttgtttgcccctcccccgtgccttccttgaccctggaaggtgccactcccactgtcctttcctaataaaatgaggaaattgcatcgcattgtctgagtaggtgtcattctattctggggggtggggtggggcaggacagcaagggggaggattgggaagacaatagcaggcatgctggggatgcggtgggctctatggcttctgaggcggaaagaaccagctggggctctagggggtatccccacgcgccctgtagcggcgcattaagcgcggcgggtgtggtggttacgcgcagcgtgaccgctacacttgccagcgccctagcgcccgctcctttcgctttcttcccttcctttctcgccacgttcgccggctttccccgtcaagctctaaatcgggggctccctttagggttccgatttagtgctttacggcacctcgaccccaaaaaacttgattagggtgatggttcacgtagtgggccatcgccctgatagacggtttttcgccctttgacgttggagtccacgttctttaatagtggactcttgttccaaactggaacaacactcaaccctatctcggtctattcttttgatttataagggattttgccgatttcggcctattggttaaaaaatgagctgatttaacaaaaatttaacgcgaattaattctgtggaatgtgtgtcagttagggtgtggaaagtccccaggctccccagcaggcagaagtatgcaaagcatgcatctcaattagtcagcaaccaggtgtggaaagtccccaggctccccagcaggcagaagtatgcaaagcatgcatctcaattagtcagcaaccatagtcccgcccctaactccgcccatcccgcccctaactccgcccagttccgcccattctccgccccatggctgactaattttttttatttatgcagaggccgaggccgcctctgcctctgagctattccagaagtagtgaggaggcttttttggaggcctaggcttttgcaaaaagctcccgggagcttgtatatccattttcggatctgatcagcacgtgttgacaattaatcatcggcatagtatatcggcatagtataatacgacaaggtgaggaactaaaccatggccaagttgaccagtgccgttccggtgctcaccgcgcgcgacgtcgccggagcggtcgagttctggaccgaccggctcgggttctcccgggacttcgtggaggacgacttcgccggtgtggtccgggacgacgtgaccctgttcatcagcgcggtccaggaccaggtggtgccggacaacaccctggcctgggtgtgggtgcgcggcctggacgagctgtacgccgagtggtcggaggtcgtgtccacgaacttccgggacgcctccgggccggccatgaccgagatcggcgagcagccgtgggggcgggagttcgccctgcgcgacccggccggcaactgcgtgcacttcgtggccgaggagcaggactgacacgtgctacgagatttcgattccaccgccgccttctatgaaaggttgggcttcggaatcgttttccgggacgccggctggatgatcctccagcgcggggatctcatgctggagttcttcgcccaccccaacttgtttattgcagcttataatggttacaaataaagcaatagcatcacaaatttcacaaataaagcatttttttcactgcattctagttgtggtttgtccaaactcatcaatgtatcttatcatgtctgtataccgtcgacctctagctagagcttggcgtaatcatggtcatagctgtttcctgtgtgaaattgttatccgctcacaattccacacaacatacgagccggaagcataaagtgtaaagcctggggtgcctaatgagtgagctaactcacattaattgcgttgcgctcactgcccgctttccagtcgggaaacctgtcgtgccagctgcattaatgaatcggccaacgcgcggggagaggcggtttgcgtattgggcgctcttccgcttcctcgctcactgactcgctgcgctcggtcgttcggctgcggcgagcggtatcagctcactcaaaggcggtaatacggttatccacagaatcaggggataacgcaggaaagaacatgtgagcaaaaggccagcaaaaggccaggaaccgtaaaaaggccgcgttgctggcgtttttccataggctccgcccccctgacgagcatcacaaaaatcgacgctcaagtcagaggtggcgaaacccgacaggactataaagataccaggcgtttccccctggaagctccctcgtgcgctctcctgttccgaccctgccgcttaccggatacctgtccgcctttctcccttcgggaagcgtggcgctttctcatagctcacgctgtaggtatctcagttcggtgtaggtcgttcgctccaagctgggctgtgtgcacgaaccccccgttcagcccgaccgctgcgccttatccggtaactatcgtcttgagtccaacccggtaagacacgacttatcgccactggcagcagccactggtaacaggattagcagagcgaggtatgtaggcggtgctacagagttcttgaagtggtggcctaactacggctacactagaagaacagtatttggtatctgcgctctgctgaagccagttaccttcggaaaaagagttggtagctcttgatccggcaaacaaaccaccgctggtagcggtggtttttttgtttgcaagcagcagattacgcgcagaaaaaaaggatctcaagaagatcctttgatcttttctacggggtctgacgctcagtggaacgaaaactcacgttaagggattttggtcatgagattatcaaaaaggatcttcacctagatccttttaaattaaaaatgaagttttaaatcaatctaaagtatatatgagtaaacttggtctgacagttaccaatgcttaatcagtgaggcacctatctcagcgatctgtctatttcgttcatccatagttgcctgactccccgtcgtgtagataactacgatacgggagggcttaccatctggccccagtgctgcaatgataccgcgagacccacgctcaccggctccagatttatcagcaataaaccagccagccggaagggccgagcgcagaagtggtcctgcaactttatccgcctccatccagtctattaattgttgccgggaagctagagtaagtagttcgccagttaatagtttgcgcaacgttgttgccattgctacaggcatcgtggtgtcacgctcgtcgtttggtatggcttcattcagctccggttcccaacgatcaaggcgagttacatgatcccccatgttgtgcaaaaaagcggttagctccttcggtcctccgatcgttgtcagaagtaagttggccgcagtgttatcactcatggttatggcagcactgcataattctcttactgtcatgccatccgtaagatgcttttctgtgactggtgagtactcaaccaagtcattctgagaatagtgtatgcggcgaccgagttgctcttgcccggcgtcaatacgggataataccgcgccacatagcagaactttaaaagtgctcatcattggaaaacgttcttcggggcgaaaactctcaaggatcttaccgctgttgagatccagttcgatgtaacccactcgtgcacccaactgatcttcagcatcttttactttcaccagcgtttctgggtgagcaaaaacaggaaggcaaaatgccgcaaaaaagggaataagggcgacacggaaatgttgaatactcatactcttcctttttcaatattattgaagcatttatcagggttattgtctcatgagcggatacatatttgaatgtatttagaaaaataaacaaataggggttccgcgcacatttccccgaaaagtgccacctgac

SEQ ID NO: 737 - DNA, 10616 bp, Artificial Sequence
  Synthetic
gtcgacggatcgggagatctcccgatcccctatggtgcactctcagtacaatctgctctgatgccgcatagttaagccagtatctgctccctgcttgtgtgttggaggtcgctgagtagtgcgcgagcaaaatttaagctacaacaaggcaaggcttgaccgacaattgcatgaagaatctgcttagggttaggcgttttgcgctgcttcgcgatgtacgggccagatatacgcgttgacattgattattgactagttattaatagtaatcaattacggggtcattagttcatagcccatatatggagttccgcgttacataacttacggtaaatggcccgcctggctgaccgcccaacgacccccgcccattgacgtcaataatgacgtatgttcccatagtaacgccaatagggactttccattgacgtcaatgggtggagtatttacggtaaactgcccacttggcagtacatcaagtgtatcatatgccaagtacgccccctattgacgtcaatgacggtaaatggcccgcctggcattatgcccagtacatgaccttatgggactttcctacttggcagtacatctacgtattagtcatcgctattaccatggtgatgcggttttggcagtacatcaatgggcgtggatagcggtttgactcacggggatttccaagtctccaccccattgacgtcaatgggagtttgttttggcaccaaaatcaacgggactttccaaaatgtcgtaacaactccgccccattgacgcaaatgggcggtaggcgtgtacggtgggaggtctatataagcagcgcgttttgcctgtactgggtctctctggttagaccagatctgagcctgggagctctctggctaactagggaacccactgcttaagcctcaataaagcttgccttgagtgcttcaagtagtgtgtgcccgtctgttgtgtgactctggtaactagagatccctcagacccttttagtcagtgtggaaaatctctagcagtggcgcccgaacagggacttgaaagcgaaagggaaaccagaggagctctctcgacgcaggactcggcttgctgaagcgcgcacggcaagaggcgaggggcggcgactggtgagtacgccaaaaattttgactagcggaggctagaaggagagagatgggtgcgagagcgtcagtattaagcgggggagaattagatcgcgatgggaaaaaattcggttaaggccagggggaaagaaaaaatataaattaaaacatatagtatgggcaagcagggagctagaacgattcgcagttaatcctggcctgttagaaacatcagaaggctgtagacaaatactgggacagctacaaccatcccttcagacaggatcagaagaacttagatcattatataatacagtagcaaccctctattgtgtgcatcaaaggatagagataaaagacaccaaggaagctttagacaagatagaggaagagcaaaacaaaagtaagaccaccgcacagcaagcggccgctgatcttcagacctggaggaggagatatgagggacaattggagaagtgaattatataaatataaagtagtaaaaattgaaccattaggagtagcacccaccaaggcaaagagaagagtggtgcagagagaaaaaagagcagtgggaataggagctttgttccttgggttcttgggagcagcaggaagcactatgggcgcagcgtcaatgacgctgacggtacaggccagacaattattgtctggtatagtgcagcagcagaacaatttgctgagggctattgaggcgcaacagcatctgttgcaactcacagtctggggcatcaagcagctccaggcaagaatcctggctgtggaaagatacctaaaggatcaacagctcctggggatttggggttgctctggaaaactcatttgcaccactgctgtgccttggaatgctagttggagtaataaatctctggaacagatttggaatcacacgacctggatggagtgggacagagaaattaacaattacacaagcttaatacactccttaattgaagaatcgcaaaaccagcaagaaaagaatgaacaagaattattggaattagataaatgggcaagtttgtggaattggtttaacataacaaattggctgtggtatataaaattattcataatgatagtaggaggcttggtaggtttaagaatagtttttgctgtactttctatagtgaatagagttaggcagggatattcaccattatcgtttcagacccacctcccaaccccgaggggacccgacaggcccgaaggaatagaagaagaaggtggagagagagacagagacagatccattcgattagtgaacggatcggcactgcgtgcgccaattctgcagacaaatggcagtattcatccacaattttaaaagaaaaggggggattggggggtacagtgcaggggaaagaatagtagacataatagcaacagacatacaaactaaagaattacaaaaacaaattacaaaaattcaaaattttcgggtttattacagggacagcagagatccagtttggttaattaaggtaccagtgcaagtgggttttaggaccaggatgaggcggggtgggggtgcctacctgacgaccgaccccgacccactggacaagcacccaacccccattccccaaattgcgcatcccctatcagagagggggaggggaaacaggatgcggcgaggcgcgtgcgcactgccagcttcagcaccgcggacagtgccttcgcccccgcctggcggcgcgcgccaccgccgcctcagcactgaaggcgcgctgacgtcactcgccggtcccccgcaaactccccttcccggccaccttggtcgcgtccgcgccgccgccggcccagccggaccgcaccacgcgaggcgcgagataggggggcacgggcgcgaccatctgcgctgcggcgccggcgactcagcgctgcctcagtctgcggtgggcagcggaggagtcgtgtcgtgcctgagagcgcagtcgagaatctagagcgctgccaccatgaaacggacagccgacggaagcgagttcgagtcaccaaagaagaagcggaaagtcatcaagattgctacacggaaatacctgggaaagcagaacgtgtacgacatcggcgtggagcgggatcacaacttcgccctgaagaatggctttatcgccagcaattgcttcgactccgtggaaatctccggcgtggaagatcggttcaacgcctccctgggcacataccacgatctgctgaaaattatcaaggacaaggacttcctggacaatgaggaaaacgaggacattctggaagatatcgtgctgaccctgacactgtttgaggacagagagatgatcgaggaacggctgaaaacctatgcccacctgttcgacgacaaagtgatgaagcagctgaagcggcggagatacaccggctggggcaggctgagccggaagctgatcaacggcatccgggacaagcagtccggcaagacaatcctggatttcctgaagtccgacggcttcgccaacagaaacttcatgcagctgatccacgacgacagcctgacctttaaagaggacatccagaaagcccaggtgtccggccagggcgatagcctgcacgagcacattgccaatctggccggcagccccgccattaagaagggcatcctgcagacagtgaaggtggtggacgagctcgtgaaagtgatgggccggcacaagcccgagaacatcgtgatcgaaatggccagagagaaccagaccacccagaagggacagaagaacagccgcgagagaatgaagcggatcgaagagggcatcaaagagctgggcagccagatcctgaaagaacaccccgtggaaaacacccagctgcagaacgagaagctgtacctgtactacctgcagaatgggcgggatatgtacgtggaccaggaactggacatcaaccggctgtccgactacgatgtggaccatatcgtgcctcagagctttctgaaggacgactccatcgacaacaaggtgctgaccagaagcgacaagaaccggggcaagagcgacaacgtgccctccgaagaggtcgtgaagaagatgaagaactactggcggcagctgctgaacgccaagctgattacccagagaaagttcgacaatctgaccaaggccgagagaggcggcctgagcgaactggataaggccggcttcatcaagagacagctggtggaaacccggcagatcacaaagcacgtggcacagatcctggactcccggatgaacactaagtacgacgagaatgacaagctgatccgggaagtgaaagtgatcaccctgaagtccaagctggtgtccgatttccggaaggatttccagttttacaaagtgcgcgagatcaacaactaccaccacgcccacgacgcctacctgaacgccgtcgtgggaaccgccctgatcaaaaagtaccctaagctggaaagcgagttcgtgtacggcgactacaaggtgtacgacgtgcggaagatgatcgccaagagcgagcaggaaatcggcaaggctaccgccaagtacttcttctacagcaacatcatgaactttttcaagaccgagattaccctggccaacggcgagatccggaagcggcctctgatcgagacaaacggcgaaaccggggagatcgtgtgggataagggccgggattttgccaccgtgcggaaagtgctgagcatgccccaagtgaatatcgtgaaaaagaccgaggtgcagacaggcggcttcagcaaagagtctatcctgcccaagaggaacagcgataagctgatcgccagaaagaaggactgggaccctaagaagtacggcggcttcgacagccccaccgtggcctattctgtgctggtggtggccaaagtggaaaagggcaagtccaagaaactgaagagtgtgaaagagctgctggggatcaccatcatggaaagaagcagcttcgagaagaatcccatcgactttctggaagccaagggctacaaagaagtgaaaaaggacctgatcatcaagctgcctaagtactccctgttcgagctggaaaacggccggaagagaatgctggcctctgccggcgaactgcagaagggaaacgaactggccctgccctccaaatatgtgaacttcctgtacctggccagccactatgagaagctgaagggctcccccgaggataatgagcagaaacagctgtttgtggaacagcacaagcactacctggacgagatcatcgagcagatcagcgagttctccaagagagtgatcctggccgacgctaatctggacaaagtgctgtccgcctacaacaagcaccgggataagcccatcagagagcaggccgagaatatcatccacctgtttaccctgaccaatctgggagcccctgccgccttcaagtactttgacaccaccatcgaccggaagaggtacaccagcaccaaagaggtgctggacgccaccctgatccaccagagcatcaccggcctgtacgagacacggatcgacctgtctcagctgggaggtgactctggcggctcaaaaagaaccgccgacggcagcgaattcgagcccaagaagaagaggaaagtctaaacgcgttaagtcgacaatcaacctctggattacaaaatttgtgaaagattgactggtattcttaactatgttgctccttttacgctatgtggatacgctgctttaatgcctttgtatcatgctattgcttcccgtatggctttcattttctcctccttgtataaatcctggttgctgtctctttatgaggagttgtggcccgttgtcaggcaacgtggcgtggtgtgcactgtgtttgctgacgcaacccccactggttggggcattgccaccacctgtcagctcctttccgggactttcgctttccccctccctattgccacggcggaactcatcgccgcctgccttgcccgctgctggacaggggctcggctgttgggcactgacaattccgtggtgttgtcggggaaatcatcgtcctttccttggctgctcgcctgtgttgccacctggattctgcgcgggacgtccttctgctacgtcccttcggccctcaatccagcggaccttccttcccgcggcctgctgccggctctgcggcctcttccgcgtcttcgccttcgccctcagacgagtcggatctccctttgggccgcctccccgcgtcgactttaagaccaatgacttacaaggcagctgtagatcttagccactttttaaaagaaaaggggggactggaagggctaattcactcccaacgaagacaagatctgctttttgcttgtactgggtctctctggttagaccagatctgagcctgggagctctctggctaactagggaacccactgcttaagcctcaataaagcttgccttgagtgcttcaagtagtgtgtgcccgtctgttgtgtgactctggtaactagagatccctcagacccttttagtcagtgtggaaaatctctagcagggcccgtttaaacccgctgatcagcctcgactgtgccttctagttgccagccatctgttgtttgcccctcccccgtgccttccttgaccctggaaggtgccactcccactgtcctttcctaataaaatgaggaaattgcatcgcattgtctgagtaggtgtcattctattctggggggtggggtggggcaggacagcaagggggaggattgggaagacaatagcaggcatgctggggatgcggtgggctctatggcttctgaggcggaaagaaccagctggggctctagggggtatccccacgcgccctgtagcggcgcattaagcgcggcgggtgtggtggttacgcgcagcgtgaccgctacacttgccagcgccctagcgcccgctcctttcgctttcttcccttcctttctcgccacgttcgccggctttccccgtcaagctctaaatcgggggctccctttagggttccgatttagtgctttacggcacctcgaccccaaaaaacttgattagggtgatggttcacgtagtgggccatcgccctgatagacggtttttcgccctttgacgttggagtccacgttctttaatagtggactcttgttccaaactggaacaacactcaaccctatctcggtctattcttttgatttataagggattttgccgatttcggcctattggttaaaaaatgagctgatttaacaaaaatttaacgcgaattaattctgtggaatgtgtgtcagttagggtgtggaaagtccccaggctccccagcaggcagaagtatgcaaagcatgcatctcaattagtcagcaaccaggtgtggaaagtccccaggctccccagcaggcagaagtatgcaaagcatgcatctcaattagtcagcaaccatagtcccgcccctaactccgcccatcccgcccctaactccgcccagttccgcccattctccgccccatggctgactaattttttttatttatgcagaggccgaggccgcctctgcctctgagctattccagaagtagtgaggaggcttttttggaggcctaggcttttgcaaaaagctcccgggagcttgtatatccattttcggatctgatcagcacgtgttgacaattaatcatcggcatagtatatcggcatagtataatacgacaaggtgaggaactaaaccatggccaagttgaccagtgccgttccggtgctcaccgcgcgcgacgtcgccggagcggtcgagttctggaccgaccggctcgggttctcccgggacttcgtggaggacgacttcgccggtgtggtccgggacgacgtgaccctgttcatcagcgcggtccaggaccaggtggtgccggacaacaccctggcctgggtgtgggtgcgcggcctggacgagctgtacgccgagtggtcggaggtcgtgtccacgaacttccgggacgcctccgggccggccatgaccgagatcggcgagcagccgtgggggcgggagttcgccctgcgcgacccggccggcaactgcgtgcacttcgtggccgaggagcaggactgacacgtgctacgagatttcgattccaccgccgccttctatgaaaggttgggcttcggaatcgttttccgggacgccggctggatgatcctccagcgcggggatctcatgctggagttcttcgcccaccccaacttgtttattgcagcttataatggttacaaataaagcaatagcatcacaaatttcacaaataaagcatttttttcactgcattctagttgtggtttgtccaaactcatcaatgtatcttatcatgtctgtataccgtcgacctctagctagagcttggcgtaatcatggtcatagctgtttcctgtgtgaaattgttatccgctcacaattccacacaacatacgagccggaagcataaagtgtaaagcctggggtgcctaatgagtgagctaactcacattaattgcgttgcgctcactgcccgctttccagtcgggaaacctgtcgtgccagctgcattaatgaatcggccaacgcgcggggagaggcggtttgcgtattgggcgctcttccgcttcctcgctcactgactcgctgcgctcggtcgttcggctgcggcgagcggtatcagctcactcaaaggcggtaatacggttatccacagaatcaggggataacgcaggaaagaacatgtgagcaaaaggccagcaaaaggccaggaaccgtaaaaaggccgcgttgctggcgtttttccataggctccgcccccctgacgagcatcacaaaaatcgacgctcaagtcagaggtggcgaaacccgacaggactataaagataccaggcgtttccccctggaagctccctcgtgcgctctcctgttccgaccctgccgcttaccggatacctgtccgcctttctcccttcgggaagcgtggcgctttctcatagctcacgctgtaggtatctcagttcggtgtaggtcgttcgctccaagctgggctgtgtgcacgaaccccccgttcagcccgaccgctgcgccttatccggtaactatcgtcttgagtccaacccggtaagacacgacttatcgccactggcagcagccactggtaacaggattagcagagcgaggtatgtaggcggtgctacagagttcttgaagtggtggcctaactacggctacactagaagaacagtatttggtatctgcgctctgctgaagccagttaccttcggaaaaagagttggtagctcttgatccggcaaacaaaccaccgctggtagcggtggtttttttgtttgcaagcagcagattacgcgcagaaaaaaaggatctcaagaagatcctttgatcttttctacggggtctgacgctcagtggaacgaaaactcacgttaagggattttggtcatgagattatcaaaaaggatcttcacctagatccttttaaattaaaaatgaagttttaaatcaatctaaagtatatatgagtaaacttggtctgacagttaccaatgcttaatcagtgaggcacctatctcagcgatctgtctatttcgttcatccatagttgcctgactccccgtcgtgtagataactacgatacgggagggcttaccatctggccccagtgctgcaatgataccgcgagacccacgctcaccggctccagatttatcagcaataaaccagccagccggaagggccgagcgcagaagtggtcctgcaactttatccgcctccatccagtctattaattgttgccgggaagctagagtaagtagttcgccagttaatagtttgcgcaacgttgttgccattgctacaggcatcgtggtgtcacgctcgtcgtttggtatggcttcattcagctccggttcccaacgatcaaggcgagttacatgatcccccatgttgtgcaaaaaagcggttagctccttcggtcctccgatcgttgtcagaagtaagttggccgcagtgttatcactcatggttatggcagcactgcataattctcttactgtcatgccatccgtaagatgcttttctgtgactggtgagtactcaaccaagtcattctgagaatagtgtatgcggcgaccgagttgctcttgcccggcgtcaatacgggataataccgcgccacatagcagaactttaaaagtgctcatcattggaaaacgttcttcggggcgaaaactctcaaggatcttaccgctgttgagatccagttcgatgtaacccactcgtgcacccaactgatcttcagcatcttttactttcaccagcgtttctgggtgagcaaaaacaggaaggcaaaatgccgcaaaaaagggaataagggcgacacggaaatgttgaatactcatactcttcctttttcaatattattgaagcatttatcagggttattgtctcatgagcggatacatatttgaatgtatttagaaaaataaacaaataggggttccgcgcacatttccccgaaaagtgccacctgac

SEQ ID NO: 738 - DNA, 8323 bp, Artificial Sequence
  Synthetic
taacaaattggctgtggtatataaaattattcataatgatagtaggaggcttggtaggtttaagaatagtttttgctgtactttctatagtgaatagagttaggcagggatattcaccattatcgtttcagacccacctcccaaccccgaggggacccagagagggcctatttcccatgattccttcatatttgcatatacgatacaaggctgttagagagataattagaattaatttgactgtaaacacaaagatattagtacaaaatacgtgacgtagaaagtaataatttcttgggtagtttgcagttttaaaattatgttttaaaatggactatcatatgcttaccgtaacttgaaagtatttcgatttcttggctttatatatcttgtggaaaggacgaaacaccgccgcgcgcgcgaaaaagccggttttagagctagaaatagcaagttaaaataaggctagtccgttatcaacttgaaaaagtggcaccgagtcggtgcttttttaagcttggcgtaactagatcttgagacaaatggcagtattcatccacaattttaaaagaaaaggggggattggggggtacagtgcaggggaaagaatagtagacataatagcaacagacatacaaactaaagaattacaaaaacaaattacaaaaattcaaaattttcgggtttattacagggacagcagagatccactttggcgccggctcgagggggcccgggtgcaaagatggataaagttttaaacagagaggaatctttgcagctaatggaccttctaggtcttgaaaggagtgggaattggctccggtgcccgtcagtgggcagagcgcacatcgcccacagtccccgagaagttggggggaggggtcggcaattgatccggtgcctagagaaggtggcgcggggtaaactgggaaagtgatgtcgtgtactggctccgcctttttcccgagggtgggggagaaccgtatataagtgcagtagtcgccgtgaacgttctttttcgcaacgggtttgccgccagaacacaggtaagtgccgtgtgtggttcccgcgggcctggcctctttacgggttatggcccttgcgtgccttgaattacttccacctggctgcagtacgtgattcttgatcccgagcttcgggttggaagtgggtgggagagttcgaggccttgcgcttaaggagccccttcgcctcgtgcttgagttgaggcctggcctgggcgctggggccgccgcgtgcgaatctggtggcaccttcgcgcctgtctcgctgctttcgataagtctctagccatttaaaatttttgatgacctgctgcgacgctttttttctggcaagatagtcttgtaaatgcgggccaagatctgcacactggtatttcggtttttggggccgcgggcggcgacggggcccgtgcgtcccagcgcacatgttcggcgaggcggggcctgcgagcgcggccaccgagaatcggacgggggtagtctcaagctggccggcctgctctggtgcctggcctcgcgccgccgtgtatcgccccgccctgggcggcaaggctggcccggtcggcaccagttgcgtgagcggaaagatggccgcttcccggccctgctgcagggagctcaaaatggaggacgcggcgctcgggagagcgggcgggtgagtcacccacacaaaggaaaagggcctttccgtcctcagccgtcgcttcatgtgactccacggagtaccgggcgccgtccaggcacctcgattagttctcgagcttttggagtacgtcgtctttaggttggggggaggggttttatgcgatggagtttccccacactgagtgggtggagactgaagttaggccagcttggcacttgatgtaattctccttggaatttgccctttttgagtttggatcttggttcattctcaagcctcagacagtggttcaaagtttttttcttccatttcaggtgtcgtgacgtacggccaccatgaccgagtacaagcccacggtgcgcctcgccacccgcgacgacgtccccagggccgtacgcaccctcgccgccgcgttcgccgactaccccgccacgcgccacaccgtcgatccggaccgccacatcgagcgggtcaccgagctgcaagaactcttcctcacgcgcgtcgggctcgacatcggcaaggtgtgggtcgcggacgacggcgccgccgtggcggtctggaccacgccggagagcgtcgaagcgggggcggtgttcgccgagatcggcccgcgcatggccgagttgagcggttcccggctggccgcgcagcaacagatggaaggcctcctggcgccgcaccggcccaaggagcccgcgtggttcctggccaccgtcggagtctcgcccgaccaccagggcaagggtctgggcagcgccgtcgtgctccccggagtggaggcggccgagcgcgccggggtgcccgccttcctggagacctccgcgccccgcaacctccccttctacgagcggctcggcttcaccgtcaccgccgacgtcgaggtgcccgaaggaccgcgcacctggtgcatgacccgcaagcccggtgcctgaacgcgttaagtcgacaatcaacctctggattacaaaatttgtgaaagattgactggtattcttaactatgttgctccttttacgctatgtggatacgctgctttaatgcctttgtatcatgctattgcttcccgtatggctttcattttctcctccttgtataaatcctggttgctgtctctttatgaggagttgtggcccgttgtcaggcaacgtggcgtggtgtgcactgtgtttgctgacgcaacccccactggttggggcattgccaccacctgtcagctcctttccgggactttcgctttccccctccctattgccacggcggaactcatcgccgcctgccttgcccgctgctggacaggggctcggctgttgggcactgacaattccgtggtgttgtcggggaaatcatcgtcctttccttggctgctcgcctgtgttgccacctggattctgcgcgggacgtccttctgctacgtcccttcggccctcaatccagcggaccttccttcccgcggcctgctgccggctctgcggcctcttccgcgtcttcgccttcgccctcagacgagtcggatctccctttgggccgcctccccgcgtcgactttaagaccaatgacttacaaggcagctgtagatcttagccactttttaaaagaaaaggggggactggaagggctaattcactcccaacgaagacaagatctgctttttgcttgtactgggtctctctggttagaccagatctgagcctgggagctctctggctaactagggaacccactgcttaagcctcaataaagcttgccttgagtgcttcaagtagtgtgtgcccgtctgttgtgtgactctggtaactagagatccctcagacccttttagtcagtgtggaaaatctctagcagtacgtatagtagttcatgtcatcttattattcagtatttataacttgcaaagaaatgaatatcagagagtgagaggaacttgtttattgcagcttataatggttacaaataaagcaatagcatcacaaatttcacaaataaagcatttttttcactgcattctagttgtggtttgtccaaactcatcaatgtatcttatcatgtctggctctagctatcccgcccctaactccgcccatcccgcccctaactccgcccagttccgcccattctccgccccatggctgactaattttttttatttatgcagaggccgaggccgcctcggcctctgagctattccagaagtagtgaggaggcttttttggaggcctagggacgtacccaattcgccctatagtgagtcgtattacgcgcgctcactggccgtcgttttacaacgtcgtgactgggaaaaccctggcgttacccaacttaatcgccttgcagcacatccccctttcgccagctggcgtaatagcgaagaggcccgcaccgatcgcccttcccaacagttgcgcagcctgaatggcgaatgggacgcgccctgtagcggcgcattaagcgcggcgggtgtggtggttacgcgcagcgtgaccgctacacttgccagcgccctagcgcccgctcctttcgctttcttcccttcctttctcgccacgttcgccggctttccccgtcaagctctaaatcgggggctccctttagggttccgatttagtgctttacggcacctcgaccccaaaaaacttgattagggtgatggttcacgtagtgggccatcgccctgatagacggtttttcgccctttgacgttggagtccacgttctttaatagtggactcttgttccaaactggaacaacactcaaccctatctcggtctattcttttgatttataagggattttgccgatttcggcctattggttaaaaaatgagctgatttaacaaaaatttaacgcgaattttaacaaaatattaacgcttacaatttaggtggcacttttcggggaaatgtgcgcggaacccctatttgtttatttttctaaatacattcaaatatgtatccgctcatgagacaataaccctgataaatgcttcaataatattgaaaaaggaagagtatgagtattcaacatttccgtgtcgcccttattcccttttttgcggcattttgccttcctgtttttgctcacccagaaacgctggtgaaagtaaaagatgctgaagatcagttgggtgcacgagtgggttacatcgaactggatctcaacagcggtaagatccttgagagttttcgccccgaagaacgttttccaatgatgagcacttttaaagttctgctatgtggcgcggtattatcccgtattgacgccgggcaagagcaactcggtcgccgcatacactattctcagaatgacttggttgagtactcaccagtcacagaaaagcatcttacggatggcatgacagtaagagaattatgcagtgctgccataaccatgagtgataacactgcggccaacttacttctgacaacgatcggaggaccgaaggagctaaccgcttttttgcacaacatgggggatcatgtaactcgccttgatcgttgggaaccggagctgaatgaagccataccaaacgacgagcgtgacaccacgatgcctgtagcaatggcaacaacgttgcgcaaactattaactggcgaactacttactctagcttcccggcaacaattaatagactggatggaggcggataaagttgcaggaccacttctgcgctcggcccttccggctggctggtttattgctgataaatctggagccggtgagcgtgggtctcgcggtatcattgcagcactggggccagatggtaagccctcccgtatcgtagttatctacacgacggggagtcaggcaactatggatgaacgaaatagacagatcgctgagataggtgcctcactgattaagcattggtaactgtcagaccaagtttactcatatatactttagattgatttaaaacttcatttttaatttaaaaggatctaggtgaagatcctttttgataatctcatgaccaaaatcccttaacgtgagttttcgttccactgagcgtcagaccccgtagaaaagatcaaaggatcttcttgagatcctttttttctgcgcgtaatctgctgcttgcaaacaaaaaaaccaccgctaccagcggtggtttgtttgccggatcaagagctaccaactctttttccgaaggtaactggcttcagcagagcgcagataccaaatactgttcttctagtgtagccgtagttaggccaccacttcaagaactctgtagcaccgcctacatacctcgctctgctaatcctgttaccagtggctgctgccagtggcgataagtcgtgtcttaccgggttggactcaagacgatagttaccggataaggcgcagcggtcgggctgaacggggggttcgtgcacacagcccagcttggagcgaacgacctacaccgaactgagatacctacagcgtgagctatgagaaagcgccacgcttcccgaagggagaaaggcggacaggtatccggtaagcggcagggtcggaacaggagagcgcacgagggagcttccagggggaaacgcctggtatctttatagtcctgtcgggtttcgccacctctgacttgagcgtcgatttttgtgatgctcgtcaggggggcggagcctatggaaaaacgccagcaacgcggcctttttacggttcctggccttttgctggccttttgctcacatgttctttcctgcgttatcccctgattctgtggataaccgtattaccgcctttgagtgagctgataccgctcgccgcagccgaacgaccgagcgcagcgagtcagtgagcgaggaagcggaagagcgcccaatacgcaaaccgcctctccccgcgcgttggccgattcattaatgcagctggcacgacaggtttcccgactggaaagcgggcagtgagcgcaacgcaattaatgtgagttagctcactcattaggcaccccaggctttacactttatgcttccggctcgtatgttgtgtggaattgtgagcggataacaatttcacacaggaaacagctatgaccatgattacgccaagcgcgcaattaaccctcactaaagggaacaaaagctggagctgcaagcttaatgtagtcttatgcaatactcttgtagtcttgcaacatggtaacgatgagttagcaacatgccttacaaggagagaaaaagcaccgtgcatgccgattggtggaagtaaggtggtacgatcgtgccttattaggaaggcaacagacgggtctgacatggattggacgaaccactgaattgccgcattgcagagatattgtatttaagtgcctagctcgatacataaacgggtctctctggttagaccagatctgagcctgggagctctctggctaactagggaacccactgcttaagcctcaataaagcttgccttgagtgcttcaagtagtgtgtgcccgtctgttgtgtgactctggtaactagagatccctcagacccttttagtcagtgtggaaaatctctagcagtggcgcccgaacagggacttgaaagcgaaagggaaaccagaggagctctctcgacgcaggactcggcttgctgaagcgcgcacggcaagaggcgaggggcggcgactggtgagtacgccaaaaattttgactagcggaggctagaaggagagagatgggtgcgagagcgtcagtattaagcgggggagaattagatcgcgatgggaaaaaattcggttaaggccagggggaaagaaaaaatataaattaaaacatatagtatgggcaagcagggagctagaacgattcgcagttaatcctggcctgttagaaacatcagaaggctgtagacaaatactgggacagctacaaccatcccttcagacaggatcagaagaacttagatcattatataatacagtagcaaccctctattgtgtgcatcaaaggatagagataaaagacaccaaggaagctttagacaagatagaggaagagcaaaacaaaagtaagaccaccgcacagcaagcggccgctgatcttcagacctggaggaggagatatgagggacaattggagaagtgaattatataaatataaagtagtaaaaattgaaccattaggagtagcacccaccaaggcaaagagaagagtggtgcagagagaaaaaagagcagtgggaataggagctttgttccttgggttcttgggagcagcaggaagcactatgggcgcagcgtcaatgacgctgacggtacaggccagacaattattgtctggtatagtgcagcagcagaacaatttgctgagggctattgaggcgcaacagcatctgttgcaactcacagtctggggcatcaagcagctccaggcaagaatcctggctgtggaaagatacctaaaggatcaacagctcctggggatttggggttgctctggaaaactcatttgcaccactgctgtgccttggaatgctagttggagtaataaatctctggaacagatttggaatcacacgacctggatggagtgggacagagaaattaacaattacacaagcttaatacactccttaattgaagaatcgcaaaaccagcaagaaaagaatgaacaagaattattggaattagataaatgggcaagtttgtggaattggtttaaca

SEQ ID NO: 739 - protein, 677 aa, Artificial Sequence; identical to SEQ ID NO: 89
  Synthetic

SEQ ID NO: 740 - protein, 677 aa, Artificial Sequence; identical to SEQ ID NO: 108
  Synthetic

SEQ ID NO: 741 - protein, 677 aa, Artificial Sequence; identical to SEQ ID NO: 122
  Synthetic

SEQ ID NO: 742 - protein, 677 aa, Artificial Sequence
  Synthetic
TLNIEDEYRLHETSKEPDVSLGSTWLSDFPQAWAETGGMGLAVRQAPLIIPLKATSTPVSIKQYPMSQEARLGIKPHIQRLLDQGILVPCQSPWNTPLLPVKLPGTNDYSPVQDLREVNKRVEDIHPTVPNPYNLLSGLPPSHQWYTVLDLKDAFFCLRLHPTSQPLFAFEWRDPEMGISGQLTWTRLPQGFKNSPTLFNEALHRDLADFRIQHPDLILLQYVDDLLLAATSELDCQQGTRALLQTLGNLGYRASAKKAQICQKQVKYLGYLLKEGQRWLTEARKETVMGQPTPKTPRQLREFLGTAGFCRLWIPGFAEMAAPLYPLTKPGTLFNWGPDQQKAYQEIKQALLTAPALGLPDLTKPFELFVDEKQGYAKGVLTQKLGPWRRPVAYLSKKLDPVAAGWPPCLRMVAAIAVLTKDAGKLTMGQPLVILAPHAVEALVKQPPDRWLSNARMTHYQALLLDTDRVQFGPVVALNPATLLPLPEEGLQHNCLDILAEAHGTRPDLTDQPLPDADHTWYTDGSSLLQEGQRKAGAAVTTETEVIWAKALPAGTSAQRAELIALTQALKMAEGKKLNVYTDSRYAFATAHIHGEIYRRRGWLTSEGKEIKNKDEILALLKALFLPKRLSIIHCPGHQKGHSAEARGNRMADQAARKAAITETPDTSTLLIENSSP

SEQ ID NO: 743 - DNA, 41 bp, Artificial Sequence
  Synthetic
cgtatcggtaactgatccgatggaaagccagttcagaaccg

SEQ ID NO: 744 - DNA, 41 bp, Artificial Sequence
  Synthetic
cgtatcggtaactgatccgatggaatgccaggtcagaaccg

SEQ ID NO: 745 - DNA, 41 bp, Artificial Sequence
  Synthetic
cgtatcggtaactgatccgatggaatgccaggtcaaaacgg

SEQ ID NO: 746 - DNA, 41 bp, Artificial Sequence; identical to SEQ ID NO: 743
  Synthetic

SEQ ID NO: 747 - DNA, 38 bp, Artificial Sequence
  Synthetic
cgtatcggtaactgatccgatgggccagttcagaaccg

SEQ ID NO: 748 - DNA, 35 bp, Artificial Sequence
  Synthetic
cgtatcggtaactgatccgatggagttcagaaccg

SEQ ID NO: 749 - DNA, 23 bp, Artificial Sequence
  Synthetic
cgtatcgtatcgtatcgtattgg

SEQ ID NO: 750 - DNA, 28 bp, Artificial Sequence
  Synthetic
cgtatcgtatcgtatcgtatcgtattgg

SEQ ID NO: 751 - DNA, 33 bp, Artificial Sequence
  Synthetic
cgtatcgtatcgtatcgtatcgtatcgtattgg

SEQ ID NO: 752 - DNA, 26 bp, Artificial Sequence
  Synthetic
cgtatcggtaactgatccgatggaaa

SEQ ID NO: 753 - DNA, 53 bp, Artificial Sequence
  Synthetic
gcgtatcggtaactgatccgatttccatcggggccaggagatcagttaccgat

SEQ ID NO: 754 - DNA, 36 bp, Artificial Sequence
  Synthetic
cgtatcggtaactgaatctcctggccccgatggaaa

SEQ ID NO: 755 - DNA, 53 bp, Artificial Sequence
  Synthetic
gcgtatcggtaactgatctccgggccaggatttccatcggatcagttaccgat

SEQ ID NO: 756 - DNA, 44 bp, Artificial Sequence
  Synthetic
cgtatcggtaactgatccgatggaaatcctggccccgatggaaa

SEQ ID NO: 757 - DNA, 905 bp, Artificial Sequence; identical to SEQ ID NO: 223
  Synthetic

SEQ ID NO: 758 - DNA, 942 bp, Artificial Sequence; identical to SEQ ID NO: 224
  Synthetic

SEQ ID NO: 759 - DNA, 1370 bp, Artificial Sequence; identical to SEQ ID NO: 225
  Synthetic

SEQ ID NO: 760 - DNA, 807 bp, Artificial Sequence; identical to SEQ ID NO: 226
  Synthetic

SEQ ID NO: 761 - DNA, 743 bp, Artificial Sequence; identical to SEQ ID NO: 227
  Synthetic

SEQ ID NO: 762 - DNA, 98 bp, Artificial Sequence
  Synthetic
gccaacatgaggatcacccatgtctgcagggcctggaggaagcagggcttcctttcctctgccatcaatgatggtgatgatggtgcgtgctcagtctg

SEQ ID NO: 763 - DNA, 33 bp, Artificial Sequence
  Synthetic
gccaacatgaggatcacccatgtctgcagggcc

SEQ ID NO: 764 - protein, 131 aa, Artificial Sequence
  Synthetic
GSASNFTQFVLVDNGGTGDVTVAPSNFANGVAEWISSNSRSQAYKVTCSVRQSSAQNRKYTIKVEVPKVATQTVGGEELPVAGWRSYLNMELTIPIFATNSDCELIVKAMQGLLKDGNPIPSAIAANSGIY

SEQ ID NO: 765 - protein, 1943 aa, Artificial Sequence
  Synthetic
MKRTADGSEFESPKKKRKVDKKYSIGLDIGTNSVGWAVITDEYKVPSKKFKVLGNTDRHSIKKNLIGALLFDSGETAEATRLKRTARRRYTRRKNRICYLQEIFSNEMAKVDDSFFHRLEESFLVEEDKKHERHPIFGNIVDEVAYHEKYPTIYHLRKKLVDSTDKADLRLIYLALAHMIKFRGHFLIEGDLNPDNSDVDKLFIQLVQTYNQLFEENPINASGVDAKAILSARLSKSRRLENLIAQLPGEKKNGLFGNLIALSLGLTPNFKSNFDLAEDAKLQLSKDTYDDDLDNLLAQIGDQYADLFLAAKNLSDAILLSDILRVNTEITKAPLSASMIKRYDEHHQDLTLLKALVRQQLPEKYKEIFFDQSKNGYAGYIDGGASQEEFYKFIKPILEKMDGTEELLVKLNREDLLRKQRTFDNGSIPHQIHLGELHAILRRQEDFYPFLKDNREKIEKILTFRIPYYVGPLARGNSRFAWMTRKSEETITPWNFEEVVDKGASAQSFIERMTNFDKNLPNEKVLPKHSLLYEYFTVYNELTKVKYVTEGMRKPAFLSGEQKKAIVDLLFKTNRKVTVKQLKEDYFKKIECFDSVEISGVEDRFNASLGTYHDLLKIIKDKDFLDNEENEDILEDIVLTLTLFEDREMIEERLKTYAHLFDDKVMKQLKRRRYTGWGRLSRKLINGIRDKQSGKTILDFLKSDGFANRNFMQLIHDDSLTFKEDIQKAQVSGQGDSLHEHIANLAGSPAIKKGILQTVKVVDELVKVMGRHKPENIVIEMARENQTTQKGQKNSRERMKRIEEGIKELGSQILKEHPVENTQLQNEKLYLYYLQNGRDMYVDQELDINRLSDYDVDAIVPQSFLKDDSIDNKVLTRSDKNRGKSDNVPSEEVVKKMKNYWRQLLNAKLITQRKFDNLTKAERGGLSELDKAGFIKRQLVETRQITKHVAQILDSRMNTKYDENDKLIREVKVITLKSKLVSDFRKDFQFYKVREINNYHHAHDAYLNAVVGTALIKKYPKLESEFVYGDYKVYDVRKMIAKSEQEIGKATAKYFFYSNIMNFFKTEITLANGEIRKRPLIETNGETGEIVWDKGRDFATVRKVLSMPQVNIVKKTEVQTGGFSKESILPKRNSDKLIARKKDWDPKKYGGFDSPTVAYSVLVVAKVEKGKSKKLKSVKELLGITIMERSSFEKNPIDFLEAKGYKEVKKDLIIKLPKYSLFELENGRKRMLASAGELQKGNELALPSKYVNFLYLASHYEKLKGSPEDNEQKQLFVEQHKHYLDEIIEQISEFSKRVILADANLDKVLSAYNKHRDKPIREQAENIIHLFTLTNLGAPAAFKYFDTTIDRKRYTSTKEVLDATLIHQSITGLYETRIDLSQLGGDSGGSSGGSSGSETPGTSESATPESSGGSSGGSSTLNIEDEYRLHETSKEPDVSLGSTWLSDFPQAWAETGGMGLAVRQAPLIIPLKATSTPVSIKQYPMSQEARLGIKPHIQRLLDQGILVPCQSPWNTPLLPVKKPGTNDYRPVQDLREVNKRVEDIHPTVPNPYNLLSGLPPSHQWYTVLDLKDAFFCLRLHPTSQPLFAFEWRDPEMGISGQLTWTRLPQGFKNSPTLFNEALHRDLADFRIQHPDLILLQYVDDLLLAATSELDCQQGTRALLQTLGNLGYRASAKKAQICQKQVKYLGYLLKEGQRWLTEARKETVMGQPTPKTPRQLREFLGKAGFCRLFIPGFAEMAAPLYPLTKPGTLFNWGPDQQKAYQEIKQALLTAPALGLPDLTKPFELFVDEKQGYAKGVLTQKLGPWRRPVAYLSKKLDPVAAGWPPCLRMVAAIAVLTKDAGKLTMGQPLVILAPHAVEALVKQPPDRWLSNARMTHYQALLLDTDRVQFGPVVALNPATLLPLPEEGLQHNCLDNSRLINSGGSKRTADGSEFEPKKKRKV

SEQ ID NO: 766 - protein, 503 aa, Artificial Sequence
  Synthetic
TLNIEDEYRLHETSKEPDVSLGSTWLSDFPQAWAETGGMGLAVRQAPLIIPLKATSTPVSIKQYPMSQEARLGIKPHIQRLLDQGILVPCQSPWNTPLLPVKKPGTNDYRPVQDLREVNKRVEDIHPTVPNPYNLLSGLPPSHQWYTVLDLKDAFFCLRLHPTSQPLFAFEWRDPEMGISGQLTWTRLPQGFKNSPTLFNEALHRDLADFRIQHPDLILLQYVDDLLLAATSELDCQQGTRALLQTLGNLGYRASAKKAQICQKQVKYLGYLLKEGQRWLTEARKETVMGQPTPKTPRQLREFLGKAGFCRLFIPGFAEMAAPLYPLTKPGTLFNWGPDQQKAYQEIKQALLTAPALGLPDLTKPFELFVDEKQGYAKGVLTQKLGPWRRPVAYLSKKLDPVAAGWPPCLRMVAAIAVLTKDAGKLTMGQPLVILAPHAVEALVKQPPDRWLSNARMTHYQALLLDTDRVQFGPVVALNPATLLPLPEEGLQHNCLDNSRLIN

SEQ ID NO: 767 - protein, 3 aa, Artificial Sequence
  Synthetic
GGS

SEQ ID NO: 768 - protein, 6 aa, Artificial Sequence
  Synthetic
GGSGGS

SEQ ID NO: 769 - protein, 9 aa, Artificial Sequence
  Synthetic
GGSGGSGGS

SEQ ID NO: 770-772 - skipped (3 entries)

SEQ ID NO: 773 - DNA, 102 bp, Artificial Sequence
  Synthetic
gccaacatgaggatcacccatgtctgcagggcctggaggaagcagggcttcctttcctctgccatcaatgatggtgatgatggtgcgtgctcagtctgggcc

SEQ ID NO: 774 - DNA, 112 bp, Artificial Sequence
  Synthetic
ggaggaagcagggcttcctttcctctgccatcaatgatggtgatgatggtgcgtgctcagtctgaaattaacaaatcaagccaacatgaggatcacccatgtctgcagggcc

SEQ ID NO: 775 - DNA, 116 bp, Artificial Sequence
  Synthetic
ggaggaagcagggcttcctttcctctgccatcaatgatggtgatgatggtgcgtgctcagtctgggccaaattaacaaatcaagccaacatgaggatcacccatgtctgcagggcc

SEQ ID NO: 776 - DNA, 148 bp, Artificial Sequence
  Synthetic
ggcccagactgagcacgtgagttttagagctaggccaacatgaggatcacccatgtctgcagggcctagcaagttaaaataaggctagtccgttatcaacttgaaaaagtgggaccgagtcggtcctctgccatctcgtgctcagtct

SEQ ID NO: 777 - DNA, 148 bp, Artificial Sequence
  Synthetic
ggcccagactgagcacgtgagttttagagctagaaatagcaagttaaaataaggctagtccgttatcaacttggccaacatgaggatcacccatgtctgcagggccaagtgggaccgagtcggtcctctgccatctcgtgctcagtct

SEQ ID NO: 778 - protein, 2281 aa, Artificial Sequence
  Synthetic
MKRTADGSEFESPKKKRKVGSASNFTQFVLVDNGGTGDVTVAPSNFANGVAEWISSNSRSQAYKVTCSVRQSSAQNRKYTIKVEVPKVATQTVGGEELPVAGWRSYLNMELTIPIFATNSDCELIVKAMQGLLKDGNPIPSAIAANSGIYSGGSSGGSSGSETPGTSESATPESSGGSSGGSSDKKYSIGLDIGTNSVGWAVITDEYKVPSKKFKVLGNTDRHSIKKNLIGALLFDSGETAEATRLKRTARRRYTRRKNRICYLQEIFSNEMAKVDDSFFHRLEESFLVEEDKKHERHPIFGNIVDEVAYHEKYPTIYHLRKKLVDSTDKADLRLIYLALAHMIKFRGHFLIEGDLNPDNSDVDKLFIQLVQTYNQLFEENPINASGVDAKAILSARLSKSRRLENLIAQLPGEKKNGLFGNLIALSLGLTPNFKSNFDLAEDAKLQLSKDTYDDDLDNLLAQIGDQYADLFLAAKNLSDAILLSDILRVNTEITKAPLSASMIKRYDEHHQDLTLLKALVRQQLPEKYKEIFFDQSKNGYAGYIDGGASQEEFYKFIKPILEKMDGTEELLVKLNREDLLRKQRTFDNGSIPHQIHLGELHAILRRQEDFYPFLKDNREKIEKILTFRIPYYVGPLARGNSRFAWMTRKSEETITPWNFEEVVDKGASAQSFIERMTNFDKNLPNEKVLPKHSLLYEYFTVYNELTKVKYVTEGMRKPAFLSGEQKKAIVDLLFKTNRKVTVKQLKEDYFKKIECFDSVEISGVEDRFNASLGTYHDLLKIIKDKDFLDNEENEDILEDIVLTLTLFEDREMIEERLKTYAHLFDDKVMKQLKRRRYTGWGRLSRKLINGIRDKQSGKTILDFLKSDGFANRNFMQLIHDDSLTFKEDIQKAQVSGQGDSLHEHIANLAGSPAIKKGILQTVKVVDELVKVMGRHKPENIVIEMARENQTTQKGQKNSRERMKRIEEGIKELGSQILKEHPVENTQLQNEKLYLYYLQNGRDMYVDQELDINRLSDYDVDAIVPQSFLKDDSIDNKVLTRSDKNRGKSDNVPSEEVVKKMKNYWRQLLNAKLITQRKFDNLTKAERGGLSELDKAGFIKRQLVETRQITKHVAQILDSRMNTKYDENDKLIREVKVITLKSKLVSDFRKDFQFYKVREINNYHHAHDAYLNAVVGTALIKKYPKLESEFVYGDYKVYDVRKMIAKSEQEIGKATAKYFFYSNIMNFFKTEITLANGEIRKRPLIETNGETGEIVWDKGRDFATVRKVLSMPQVNIVKKTEVQTGGFSKESILPKRNSDKLIARKKDWDPKKYGGFDSPTVAYSVLVVAKVEKGKSKKLKSVKELLGITIMERSSFEKNPIDFLEAKGYKEVKKDLIIKLPKYSLFELENGRKRMLASAGELQKGNELALPSKYVNFLYLASHYEKLKGSPEDNEQKQLFVEQHKHYLDEIIEQISEFSKRVILADANLDKVLSAYNKHRDKPIREQAENIIHLFTLTNLGAPAAFKYFDTTIDRKRYTSTKEVLDATLIHQSITGLYETRIDLSQLGGDSGGSSGGSSGSETPGTSESATPESSGGSSGGSSTLNIEDEYRLHETSKEPDVSLGSTWLSDFPQAWAETGGMGLAVRQAPLIIPLKATSTPVSIKQYPMSQEARLGIKPHIQRLLDQGILVPCQSPWNTPLLPVKKPGTNDYRPVQDLREVNKRVEDIHPTVPNPYNLLSGLPPSHQWYTVLDLKDAFFCLRLHPTSQPLFAFEWRDPEMGISGQLTWTRLPQGFKNSPTLFNEALHRDLADFRIQHPDLILLQYVDDLLLAATSELDCQQGTRALLQTLGNLGYRASAKKAQICQKQVKYLGYLLKEGQRWLTEARKETVMGQPTPKTPRQLREFLGKAGFCRLFIPGFAEMAAPLYPLTKPGTLFNWGPDQQKAYQEIKQALLTAPALGLPDLTKPFELFVDEKQGYAKGVLTQKLGPWRRPVAYLSKKLDPVAAGWPPCLRMVAAIAVLTKDAGKLTMGQPLVILAPHAVEALVKQPPDRWLSNARMTHYQALLLDTDRVQFGPVVALNPATLLPLPEEGLQHNCLDILAEAHGTRPDLTDQPLPDADHTWYTDGSSLLQEGQRKAGAAVTTETEVIWAKALPAGTSAQRAELIALTQALKMAEGKKLNVYTDSRYAFATAHIHGEIYRRRGWLTSEGKEIKNKDEILALLKALFLPKRLSIIHCPGHQKGHSAEARGNRMADQAARKAAITETPDTSTLLIENSSPSGGSKRTADGSEFEPKKKRKV

SEQ ID NO: 779 - protein, 881 aa, Artificial Sequence
  Synthetic
MKRTADGSEFESPKKKRKVGSASNFTQFVLVDNGGTGDVTVAPSNFANGVAEWISSNSRSQAYKVTCSVRQSSAQNRKYTIKVEVPKVATQTVGGEELPVAGWRSYLNMELTIPIFATNSDCELIVKAMQGLLKDGNPIPSAIAANSGIYSGGSSGGSSGSETPGTSESATPESSGGSSGGSSTLNIEDEYRLHETSKEPDVSLGSTWLSDFPQAWAETGGMGLAVRQAPLIIPLKATSTPVSIKQYPMSQEARLGIKPHIQRLLDQGILVPCQSPWNTPLLPVKKPGTNDYRPVQDLREVNKRVEDIHPTVPNPYNLLSGLPPSHQWYTVLDLKDAFFCLRLHPTSQPLFAFEWRDPEMGISGQLTWTRLPQGFKNSPTLFDEALHRDLADFRIQHPDLILLQYVDDLLLAATSELDCQQGTRALLQTLGNLGYRASAKKAQICQKQVKYLGYLLKEGQRWLTEARKETVMGQPTPKTPRQLREFLGTAGFCRLWIPGFAEMAAPLYPLTKTGTLFNWGPDQQKAYQEIKQALLTAPALGLPDLTKPFELFVDEKQGYAKGVLTQKLGPWRRPVAYLSKKLDPVAAGWPPCLRMVAAIAVLTKDAGKLTMGQPLVILAPHAVEALVKQPPDRWLSNARMTHYQALLLDTDRVQFGPVVALNPATLLPLPEEGLQHNCLDILAEAHGTRPDLTDQPLPDADHTWYTDGSSLLQEGQRKAGAAVTTETEVIWAKALPAGTSAQRAELIALTQALKMAEGKKLNVYTDSRYAFATAHIHGEIYRRRGLLTSEGKEIKNKDEILALLKALFLPKRLSIIHCPGHQKGHSAEARGNRMADQAARKAAITETPDTSTLLIENSSPSGGSKRTADGSEFEPKKKRKV

SEQ ID NO: 780 - protein, 881 aa, Artificial Sequence
  Synthetic
MKRTADGSEFESPKKKRKVTLNIEDEYRLHETSKEPDVSLGSTWLSDFPQAWAETGGMGLAVRQAPLIIPLKATSTPVSIKQYPMSQEARLGIKPHIQRLLDQGILVPCQSPWNTPLLPVKKPGTNDYRPVQDLREVNKRVEDIHPTVPNPYNLLSGLPPSHQWYTVLDLKDAFFCLRLHPTSQPLFAFEWRDPEMGISGQLTWTRLPQGFKNSPTLFDEALHRDLADFRIQHPDLILLQYVDDLLLAATSELDCQQGTRALLQTLGNLGYRASAKKAQICQKQVKYLGYLLKEGQRWLTEARKETVMGQPTPKTPRQLREFLGTAGFCRLWIPGFAEMAAPLYPLTKTGTLFNWGPDQQKAYQEIKQALLTAPALGLPDLTKPFELFVDEKQGYAKGVLTQKLGPWRRPVAYLSKKLDPVAAGWPPCLRMVAAIAVLTKDAGKLTMGQPLVILAPHAVEALVKQPPDRWLSNARMTHYQALLLDTDRVQFGPVVALNPATLLPLPEEGLQHNCLDILAEAHGTRPDLTDQPLPDADHTWYTDGSSLLQEGQRKAGAAVTTETEVIWAKALPAGTSAQRAELIALTQALKMAEGKKLNVYTDSRYAFATAHIHGEIYRRRGLLTSEGKEIKNKDEILALLKALFLPKRLSIIHCPGHQKGHSAEARGNRMADQAARKAAITETPDTSTLLIENSSPSGGSSGGSSGSETPGTSESATPESSGGSSGGSSGSASNFTQFVLVDNGGTGDVTVAPSNFANGVAEWISSNSRSQAYKVTCSVRQSSAQNRKYTIKVEVPKVATQTVGGEELPVAGWRSYLNMELTIPIFATNSDCELIVKAMQGLLKDGNPIPSAIAANSGIYSGGSKRTADGSEFEPKKKRKV

SEQ ID NO: 781 - DNA, 48 bp, Artificial Sequence
  Synthetic
aggaaccccgggtctgactcgtgcactaccgtctcctttcctctgcag

SEQ ID NO: 782 - protein, 8 aa, Artificial Sequence
  Synthetic
SLGPRLST

SEQ ID NO: 783 - DNA, 45 bp, Artificial Sequence
  Synthetic
aaccccgggtctgactcgtgcactaccgtctcgtgtcctctgcag

SEQ ID NO: 784 - protein, 7 aa, Artificial Sequence
  Synthetic
LGPRLST

SEQ ID NO: 785 - DNA, 48 bp, Artificial Sequence
  Synthetic
tccttggggcccagactgagcacgtgatggcagaggaaaggagacgtc

SEQ ID NO: 786 - DNA, 48 bp, Artificial Sequence
  Synthetic
tccttggggcccagactgagcacgagatggcagaggaaaggagacgtc

SEQ ID NO: 787 - DNA, 45 bp, Artificial Sequence
  Synthetic
ttggggcccagactgagcacgtgatggcagagcacaggagacgtc

SEQ ID NO: 788 - DNA, 45 bp, Artificial Sequence
  Synthetic
ttggggcccagactgagcacgagatggcagagcacaggagacgtc

SEQ ID NO: 789 - DNA, 297 bp, Artificial Sequence
  Synthetic
atgtgggctgcctagaaaggcatggatgagagaagcctggagacagggatcccagggaaacgcccatgcaattagtctatttctgctgcaagtaagcatgcatttgtaggcttgatgctttttttctgcttctccagccctggcctgggtcaatccttggggcccagactgagcacgtgatggcagaggaaaggaagccctgcttcctccagagggcgtcgcaggacagcttttcctagacaggggctagtatgtgcagctcctgcaccgggatactggttgacaagtttggctggg

SEQ ID NO: 790 - DNA, 297 bp, Artificial Sequence
  Synthetic
cccagccaaacttgtcaaccagtatcccggtgcaggagctgcacatactagcccctgtctaggaaaagctgtcctgcgacgccctctggaggaagcagggcttcctttcctctgccatcacgtgctcagtctgggccccaaggattgacccaggccagggctggagaagcagaaaaaaagcatcaagcctacaaatgcatgcttacttgcagcagaaatagactaattgcatgggcgtttccctgggatccctgtctccaggcttctctcatccatgcctttctaggcagcccacat

SEQ ID NO: 791 - DNA, 40 bp, Artificial Sequence
  Synthetic
tggggcccagactgagcacgtgatggcagaggaaaggaag

SEQ ID NO: 792 - DNA, 40 bp, Artificial Sequence
  Synthetic
tggggcccagactgagcacgtgatggcaaaggaaaggaag

SEQ ID NO: 793 - DNA, 40 bp, Artificial Sequence
  Synthetic
tggggcccagactgagcacgagatggcagaggaaaggaag

SEQ ID NO: 794 - DNA, 40 bp, Artificial Sequence
  Synthetic
tggggcccagactgagcacgagatggcaaaggaaaggaag

SEQ ID NO: 795 - DNA, 29 bp, Artificial Sequence
  Synthetic
ctgagcacgtgatggcagaggaaaggaag

SEQ ID NO: 796 - DNA, 19 bp, Artificial Sequence
  Synthetic
ctgagcacgggaaaggaag

SEQ ID NO: 797 - DNA, 29 bp, Artificial Sequence
  Synthetic
ctgagcacgtgatggcaaaggaaaggaag

SEQ ID NO: 798 - DNA, 9 bp, Artificial Sequence
  Synthetic
ctgagcacg

SEQ ID NO: 799 - DNA, 16 bp, Artificial Sequence
  Synthetic
ctgagcacgggaaagg

SEQ ID NO: 800 - DNA, 29 bp, Artificial Sequence
  Synthetic
ctgagcacgtgatggcaggggaaaggaag

SEQ ID NO: 801 - DNA, 31 bp, Artificial Sequence
  Synthetic
gactgagcacgtgatggcagaggaaaggaag

SEQ ID NO: 802 - DNA, 31 bp, Artificial Sequence
  Synthetic
gactgagcacgcaccatcatcaccatcattg

SEQ ID NO: 803 - DNA, 31 bp, Artificial Sequence
  Synthetic
gactgagcacgtgatggcaaaggaaaggaag

SEQ ID NO: 804 - DNA, 31 bp, Artificial Sequence
  Synthetic
gactgagcacggattacaaggatgacgacga

SEQ ID NO: 805 - protein, 7 aa, Artificial Sequence
  Synthetic
GLGGTML

SEQ ID NO: 806 - DNA, 21 bp, Artificial Sequence
  Synthetic
ggccttggcggctacatgctg

SEQ ID NO: 807 - DNA, 21 bp, Artificial Sequence
  Synthetic
ggccttggcgtctacatgctg

SEQ ID NO: 808 - protein, 7 aa, Artificial Sequence
  Synthetic
GLGVTML

SEQ ID NO: 809 - DNA, 36 bp, Artificial Sequence
  Synthetic
ggggcagtggtggggggccttggcggctacatgctg

SEQ ID NO: 810 - DNA, 43 bp, Artificial Sequence
  Synthetic
gcagtggtggggggccttggatgtagacgccaaggccccccac

SEQ ID NO: 811 - protein, 25 aa, Artificial Sequence
  Synthetic
NFKIRHNIEDGSVQLADHYQQNTPI

SEQ ID NO: 812 - protein, 24 aa, Artificial Sequence
  Synthetic
NFKIHNIEDGSVQLADHYQQNTPI

SEQ ID NO: 813 - protein, 24 aa, Artificial Sequence
  Synthetic
NFKIRNIEDGSVQLADHYQQNTPI

SEQ ID NO: 814 - protein, 24 aa, Artificial Sequence
  Synthetic
NFKIRHNEDGSVQLADHYQQNTPI

SEQ ID NO: 815 - protein, 19 aa, Artificial Sequence
  Synthetic
NFKIRHNQLADHYQQNTPI

SEQ ID NO: 816 - protein, 20 aa, Artificial Sequence
  Synthetic
HNIEDGSVQLADHYQQNTPI

SEQ ID NO: 817 - protein, 14 aa, Artificial Sequence
  Synthetic
NFKIRHNIEDGSVQ

SEQ ID NO: 818 - DNA, 12 bp, Artificial Sequence
  Synthetic
actgcaagtgca

SEQ ID NO: 819 - DNA, 12 bp, Artificial Sequence
  Synthetic
tgcagtgttcac

SEQ ID NO: 820 - RNA, 122 nt, Artificial Sequence
  Synthetic
ggcccagacugagcacgugaguuuuagagcuagaaauagcaaguuaaaauaaggcuaguccguuaucaacuugaaaaaguggcaccgagucggugcucugccaucucgugcucagucuguuu

SEQ ID NO: 821 - DNA, 28 bp, Artificial Sequence
  Synthetic
ggcccagactgagcacgtgatggcagag

SEQ ID NO: 822 - DNA, 28 bp, Artificial Sequence
  Synthetic
gagatggcagagcagggggggggggggg

SEQ ID NO: 823 - DNA, 31 bp, Artificial Sequence
  Synthetic
gagatggcagagcaaaaaaaaaaaaaaaaaa

SEQ ID NO: 824 - DNA, 32 bp, Artificial Sequence
  Synthetic
ggcccagactgagcacgtgatggcagagcaca

SEQ ID NO: 825 - DNA, 32 bp, Artificial Sequence
  Synthetic
ggcccagactgagcacgagatggcagagcaca

SEQ ID NO: 826 - DNA, 24 bp, Artificial Sequence
  Synthetic
tccagatggcacattgtcagaggg

SEQ ID NO: 827 - DNA, 24 bp, Artificial Sequence
  Synthetic
tgacgggagggcagaactagtcct

SEQ ID NO: 828 - DNA, 24 bp, Artificial Sequence
  Synthetic
ttcagacagcatatttgagtcatt

SEQ ID NO: 829 - DNA, 40 bp, Artificial Sequence
  Synthetic
tggggcccagactgagcacgtgatggcagcggaaaggaag

SEQ ID NO: 830 - DNA, 40 bp, Artificial Sequence
  Synthetic
tggggcccagactgagcacgctttgatggcagaggaaagg

SEQ ID NO: 831 - DNA, 40 bp, Artificial Sequence
  Synthetic
tggggcccagactgagcacgcttttgatggcagaggaaag

SEQ ID NO: 832 - DNA, 39 bp, Artificial Sequence
  Synthetic
tggggcccagactgagcactgatggcagaggaaaggaag

SEQ ID NO: 833 - DNA, 38 bp, Artificial Sequence
  Synthetic
tggggcccagactgagcatgatggcagaggaaaggaag

SEQ ID NO: 834 - DNA, 38 bp, Artificial Sequence
  Synthetic
tggggcccagactgagcacgatggcagaggaaaggaag

SEQ ID NO: 835 - DNA, 40 bp, Artificial Sequence
  Synthetic
tggggcccagactgagcacggtgatggcagaggaaaggaa

SEQ ID NO: 836 - DNA, 39 bp, Artificial Sequence
  Synthetic
tggggcccagactgagcacggatggcagaggaaaggaag

SEQ ID NO: 837 - DNA, 40 bp, Artificial Sequence
  Synthetic
tggggcccagactgagcacgttgatggcagaggaaaggaa

SEQ ID NO: 838 - DNA, 32 bp, Artificial Sequence
  Synthetic
tggggcccagactgatggcagaggaaaggaag

SEQ ID NO: 839 - DNA, 40 bp, Artificial Sequence
  Synthetic
tggggcccagactgagcacgatgatggcagaggaaaggaa

SEQ ID NO: 840 - DNA, 34 bp, Artificial Sequence
  Synthetic
tggggcccagactgagcacgcagaggaaaggaag

SEQ ID NO: 841 - DNA, 26 bp, Artificial Sequence
  Synthetic
tggggctgatggcagaggaaaggaag

SEQ ID NO: 842 - DNA, 30 bp, Artificial Sequence
  Synthetic
tggggcccagactgagcagaggaaaggaag

SEQ ID NO: 843 - DNA, 40 bp, Artificial Sequence
  Synthetic
tggggcccagactgagcacgctgatggcagaggaaaggaa

SEQ ID NO: 844 - DNA, 27 bp, Artificial Sequence
  Synthetic
tggggcctgatggcagaggaaaggaag

SEQ ID NO: 845 - DNA, 25 bp, Artificial Sequence
  Synthetic
tggggtgatggcagaggaaaggaag

SEQ ID NO: 846 - DNA, 31 bp, Artificial Sequence
  Synthetic
tggggcccagactgagcacgaggaaaggaag

SEQ ID NO: 847 - DNA, 33 bp, Artificial Sequence
  Synthetic
tggggcccagactgagcacgagaggaaaggaag

SEQ ID NO: 848 - DNA, 36 bp, Artificial Sequence
  Synthetic
tggggcccagactgagcacgggcagaggaaaggaag

SEQ ID NO: 849 - DNA, 25 bp, Artificial Sequence
  Synthetic
tggggcccagactgaggaaaggaag

SEQ ID NO: 850 - DNA, 19 bp, Artificial Sequence
  Synthetic
tggggcagaggaaaggaag

SEQ ID NO: 851 - DNA, 29 bp, Artificial Sequence
  Synthetic
tggggcccagactgagcacggaaaggaag

SEQ ID NO: 852 - DNA, 28 bp, Artificial Sequence
  Synthetic
tggggcccagatggcagaggaaaggaag

SEQ ID NO: 853 - DNA, 28 bp, Artificial Sequence
  Synthetic
tggggcccagactgagcacgaaaggaag

SEQ ID NO: 854 - DNA, 21 bp, Artificial Sequence
  Synthetic
tggatggcagaggaaaggaag

SEQ ID NO: 855 - DNA, 39 bp, Artificial Sequence
  Synthetic
tggggcccagactgagctttgatggcagaggaaaggaag

SEQ ID NO: 856 - DNA, 23 bp, Artificial Sequence
  Synthetic
tggggcccagactgagcacgaag

SEQ ID NO: 857 - DNA, 32 bp, Artificial Sequence
  Synthetic
tggggcccagactgagcacggaggaaaggaag

SEQ ID NO: 858 - DNA, 24 bp, Artificial Sequence
  Synthetic
tggggcccagactgagcacggaag

SEQ ID NO: 859 - DNA, 21 bp, Artificial Sequence
  Synthetic
tggggcccagaggaaaggaag

SEQ ID NO: 860 - DNA, 30 bp, Artificial Sequence
  Synthetic
tggggcccagtgatggcagaggaaaggaag

SEQ ID NO: 861 - DNA, 23 bp, Artificial Sequence
  Synthetic
tggtgatggcagaggaaaggaag

SEQ ID NO: 862 - DNA, 40 bp, Artificial Sequence
  Synthetic
tggggcccagactgagcacgtgtgatggcagaggaaagga

SEQ ID NO: 863 - DNA, 18 bp, Artificial Sequence
  Synthetic
atggcagaggaaaggaag

SEQ ID NO: 864 - DNA, 34 bp, Artificial Sequence
  Synthetic
tggggcccagactgtgatggcagaggaaaggaag

SEQ ID NO: 865 - DNA, 36 bp, Artificial Sequence
  Synthetic
tggggcccagactgagtgatggcagaggaaaggaag

SEQ ID NO: 866 - DNA, 28 bp, Artificial Sequence
  Synthetic
tggggccctgatggcagaggaaaggaag

SEQ ID NO: 867 - DNA, 35 bp, Artificial Sequence
  Synthetic
tggggcccagactgagcacggcagaggaaaggaag

SEQ ID NO: 868 - DNA, 40 bp, Artificial Sequence
  Synthetic
cctgaaccgtatatcctatggccctgactggaaggatttc

SEQ ID NO: 869 - DNA, 40 bp, Artificial Sequence
  Synthetic
aaccgtatatctatcctatggccctgactggaaggatttc

SEQ ID NO: 870 - DNA, 40 bp, Artificial Sequence
  Synthetic
aaccgtatatctatcctattgccctgactggaaggatttc

SEQ ID NO: 871 - DNA, 40 bp, Artificial Sequence
  Synthetic
aaccgtatatctatcctatgtccctgactggaaggatttc

SEQ ID NO: 872 - DNA, 40 bp, Artificial Sequence
  Synthetic
aaccgtatatctatcctatggccctgactggaaggctttc

SEQ ID NO: 873 - DNA, 40 bp, Artificial Sequence
  Synthetic
aaccgtatatctatcctctggccctgactggaaggatttc

SEQ ID NO: 874 - DNA, 40 bp, Artificial Sequence
  Synthetic
aaccgtatatctatcctctggccctgactggaaggctttc

SEQ ID NO: 875 - DNA, 40 bp, Artificial Sequence
  Synthetic
caccatggtgcacctgactcctgaggagaagtctgccgtt

SEQ ID NO: 876 - DNA, 40 bp, Artificial Sequence
  Synthetic
caccatggtgcacctgactcctgtggagaagtctgccgtt

SEQ ID NO: 877 - DNA, 40 bp, Artificial Sequence
  Synthetic
caccatggcgcacctgactcctgtggagaagtctgccgtt

SEQ ID NO: 878 - DNA, 40 bp, Artificial Sequence
  Synthetic
caccatggtgcacctgactcctgtggagaagtctgtcgtt

SEQ ID NO: 879 - DNA, 29 bp, Artificial Sequence
  Synthetic
  misc_feature (5)..(24): n is a, c, g, or t
caccnnnnnnnnnnnnnnnnnnnngtttt

SEQ ID NO: 880 - DNA, 29 bp, Artificial Sequence
  Synthetic
  misc_feature (10)..(29): n is a, c, g, or t
ctctaaaacnnnnnnnnnnnnnnnnnnnn

SEQ ID NO: 881 - DNA, 67 bp, Artificial Sequence
  Synthetic
agagctagaaatagcaagttaaaataaggctagtccgttatcaacttgaaaaagtggcaccgagtcg

SEQ ID NO: 882 - DNA, 67 bp, Artificial Sequence
  Synthetic
gcaccgactcggtgccactttttcaagttgataacggactagccttattttaacttgctatttctag

SEQ ID NO: 883 - DNA, 34 bp, Artificial Sequence
  Synthetic
  misc_feature (5)..(34): n is a, c, g, or t
gtgcnnnnnnnnnnnnnnnnnnnnnnnnnnnnnn

SEQ ID NO: 884 - DNA, 34 bp, Artificial Sequence
  Synthetic
  misc_feature (5)..(34): n is a, c, g, or t
aaaannnnnnnnnnnnnnnnnnnnnnnnnnnnnn

SEQ ID NO: 885 - DNA, 104 bp, Artificial Sequence
  Synthetic
cagaggaccgactcggtcccactttttcaagttgataacggactagccttattttaacttgctatttctagctctaaaactcacgtgctcagtctgggccggtg

SEQ ID NO: 886 - DNA, 105 bp, Artificial Sequence
  Synthetic
atcacgcaccgactcggtgccactttttcaagttgataacggactagccttattttaacttgctatttctagctctaaaacttcttcttctgctcggactcggtg

SEQ ID NO: 887 - DNA, 105 bp, Artificial Sequence
  Synthetic
tttccgcaccgactcggtgccactttttcaagttgataacggactagccttattttaacttgctatttctagctctaaaacggtgctgcagaagggattccggtg

SEQ ID NO: 888 - DNA, 105 bp, Artificial Sequence
  Synthetic
tcgttgcaccgactcggtgccactttttcaagttgataacggactagccttattttaacttgctatttctagctctaaaaccaggtaatgactaagatgacggtg

SEQ ID NO: 889 - DNA, 75 bp, Artificial Sequence
  Synthetic
tccttggggcccagactgagcacgtgatggcagaggaaaggaagccctgcttcctccagagggcgtcgcaggaca

SEQ ID NO: 890 - protein, 24 aa, Artificial Sequence
  Synthetic
SLGPRLSTWQRKGSPASSRGRRRT

SEQ ID NO: 891 - DNA, 75 bp, Artificial Sequence
  Synthetic
tgtcctgcgacgccctctggaggaagcagggcttcctttcctctgccatcacgtgctcagtctgggccccaagga

SEQ ID NO: 892 - DNA, 201 bp, Artificial Sequence
  Synthetic
tattattactctatgttctatttaagttttcatgttctaaaaatgtatcccagtttacacgtctcatatgccccttggcagtcatcttagtcattacctgaggtgttcgttgtaactcatataaactgagttcccatgttttgcttaatggttgagttccgtttgtctgcacagcctgagacattgctggaaataaagaag

SEQ ID NO: 893 - DNA, 201 bp, Artificial Sequence
  Synthetic
cttctttatttccagcaatgtctcaggctgtgcagacaaacggaactcaaccattaagcaaaacatgggaactcagtttatatgagttacaacgaacacctcaggtaatgactaagatgactgccaaggggcatatgagacgtgtaaactgggatacatttttagaacatgaaaacttaaatagaacatagagtaataata

SEQ ID NO: 894 - DNA, 20 bp, Artificial Sequence
  Synthetic
gtcatcttagtcattacctg

SEQ ID NO: 895 - DNA, 29 bp, Artificial Sequence
  Synthetic
aacgaacaccgcaggtaatgactaagatg

SEQ ID NO: 896 - DNA, 76 bp, Artificial Sequence; identical to SEQ ID NO: 131
  Synthetic

SEQ ID NO: 897 - RNA, 126 nt, Artificial Sequence
  Synthetic
  misc_feature (99)..(123): n is a, c, g, or u
gaaggcaauaaugcuaauuacaguuuuagagcuagaaauagcaaguuaaaauaaggcuaguccguuaucaacuugaaaaaguggcaccgaguaggugcnnnnnnnnnnnnnnnnnnnnnnnnnuuu

SEQ ID NO: 898 - RNA, 135 nt, Artificial Sequence
  Synthetic
  misc_feature (99)..(123): n is a, c, g, or u
  misc_feature (128)..(132): n is a, c, g, or u
gaaggcaauaaugcuaauuacaguuuuagagcuagaaauagcaaguuaaaauaaggcuaguccguuaucaacuugaaaaaguggcaccgaguaggugcnnnnnnnnnnnnnnnnnnnnnnnnngaaannnnnuuu

SEQ ID NO: 899 - protein, 18 aa, Artificial Sequence
  Synthetic
AACAGNRVRRSVGSSLKC

SEQ ID NO: 900 - protein, 15 aa, Artificial Sequence
  Synthetic
AADHCPVVEVNGVTI

SEQ ID NO: 901 - protein, 13 aa, Artificial Sequence
  Synthetic
AAHLPTGTPLDID

SEQ ID NO: 902 - protein, 12 aa, Artificial Sequence
  Synthetic
AALAVWAGLAVQ

SEQ ID NO: 903 - protein, 15 aa, Artificial Sequence
  Synthetic
AALGVATAAQITAGI

SEQ ID NO: 904 - protein, 24 aa, Artificial Sequence
  Synthetic
AALLNTPPPYQVSCGGESDRATAR

SEQ ID NO: 905 - protein, 15 aa, Artificial Sequence
  Synthetic
AAQSFTGVVYGTHTT

SEQ ID NO: 906 - protein, 15 aa, Artificial Sequence
  Synthetic
ACEVEPAFGHSDAAC

SEQ ID NO: 907 - protein, 15 aa, Artificial Sequence
  Synthetic
ACTFWAVNAYSSGGY

SEQ ID NO: 908 - protein, 7 aa, Artificial Sequence
  Synthetic
ADDPLLR

SEQ ID NO: 909 - protein, 8 aa, Artificial Sequence
  Synthetic
ADDPLLRT

SEQ ID NO: 910 - protein, 15 aa, Artificial Sequence
  Synthetic
AEMICDIDTYIVEAG

SEQ ID NO: 911 - protein, 20 aa, Artificial Sequence
  Synthetic
AEMICDIDTYIVEAGLASFI

SEQ ID NO: 912 - protein, 7 aa, Artificial Sequence
  Synthetic
AEPLLSC

SEQ ID NO: 913 - protein, 15 aa, Artificial Sequence
  Synthetic
AFVSTSSSRRYTEVY

SEQ ID NO: 914 - protein, 31 aa, Artificial Sequence
  Synthetic
AGFIYRETFCITTIYKTGQPAADHYYSKVTA

SEQ ID NO: 915 - protein, 15 aa, Artificial Sequence
  Synthetic
AGLLACCAKCLYYLR

SEQ ID NO: 916 - protein, 12 aa, Artificial Sequence
  Synthetic
AHTTSDPWHPPG

SEQ ID NO: 917 - protein, 15 aa, Artificial Sequence
  Synthetic
AIAKLEDAKELLESS

SEQ ID NO: 918 - protein, 15 aa, Artificial Sequence
  Synthetic
AIDNLRASLETTNQA

SEQ ID NO: 919 - protein, 7 aa, Artificial Sequence
  Synthetic
AKGVEFR

SEQ ID NO: 920 - protein, 15 aa, Artificial Sequence
  Synthetic
AKWAVPTTRTDDKLR

SEQ ID NO: 921 - protein, 10 aa, Artificial Sequence
  Synthetic
ALAEVLKKPV

SEQ ID NO: 922 - protein, 15 aa, Artificial Sequence
  Synthetic
ALGVINTLEWIPRFK

SEQ ID NO: 923 - protein, 15 aa, Artificial Sequence
  Synthetic
ALHQSMLNSQAIDNL

SEQ ID NO: 924 - protein, 10 aa, Artificial Sequence
  Synthetic
ALIGILSLFV

SEQ ID NO: 925 - protein, 20 aa, Artificial Sequence
  Synthetic
ALLNTPPPYQVSCGGESDRA

SEQ ID NO: 926 - protein, 24 aa, Artificial Sequence
  Synthetic
ALLNTPPPYQVSCGGESDRASARV

SEQ ID NO: 927 - protein, 15 aa, Artificial Sequence
  Synthetic
ALVEGLAPGGGNCHL

SEQ ID NO: 928 - protein, 12 aa, Artificial Sequence
  Synthetic
AMAAWSERAGEA

SEQ ID NO: 929 - protein, 15 aa, Artificial Sequence
  Synthetic
ANCASILCKCYTTGT

SEQ ID NO: 930 - protein, 12 aa, Artificial Sequence
  Synthetic
ANPNPYTSRRSV

SEQ ID NO: 931 - protein, 8 aa, Artificial Sequence
  Synthetic
APGPGEVW

SEQ ID NO: 932 - protein, 23 aa, Artificial Sequence
  Synthetic
APLPPHTTERIETRSARHPWRIR

SEQ ID NO: 933 - protein, 27 aa, Artificial Sequence
  Synthetic
APPMPPQPPRAHGQHYGHHHHQLPFLG

SEQ ID NO: 934 - protein, 27 aa, Artificial Sequence
  Synthetic
APPTLPQPPCAHGQHYGHHHHQLPFLG

SEQ ID NO: 935 - protein, 27 aa, Artificial Sequence
  Synthetic
APPTLPQPPRAHGQHYGHHHHQLPFLG

SEQ ID NO: 936 - protein, 22 aa, Artificial Sequence
  Synthetic
APQPGPQPPQPPQPQPEAPAPQ

SEQ ID NO: 937 - protein, 15 aa, Artificial Sequence
  Synthetic
AQLASYFNPGGSYYK

SEQ ID NO: 938 - protein, 13 aa, Artificial Sequence
  Synthetic
ARAAHLPTGTPLD

SEQ ID NO: 939 - protein, 15 aa, Artificial Sequence
  Synthetic
ARLVSEIAMHTTEDK

SEQ ID NO: 940 - protein, 20 aa, Artificial Sequence
  Synthetic
ARLVSEIAMHTTEDKISRAV

SEQ ID NO: 941 - protein, 17 aa, Artificial Sequence
  Synthetic
ASDVETAEGGEIHELLR

SEQ ID NO: 942 - protein, 19 aa, Artificial Sequence
  Synthetic
ASDVETAEGGEIHELLRLQ

SEQ ID NO: 943 - protein, 21 aa, Artificial Sequence
  Synthetic
ASDVETAEGGEIHELLRLQSR

SEQ ID NO: 944 - protein, 19 aa, Artificial Sequence
  Synthetic
ASDVETAEGGEIHKLLRLQ

SEQ ID NO: 945 - protein, 12 aa, Artificial Sequence
  Synthetic
ASDVLPGHWLQG

SEQ ID NO: 946 - protein, 15 aa, Artificial Sequence
  Synthetic
ASELGITAEDARLVS

SEQ ID NO: 947 - protein, 20 aa, Artificial Sequence
  Synthetic
ASELGITAEDARLVSEIAMH

SEQ ID NO: 948 - protein, 13 aa, Artificial Sequence
  Synthetic
ASESSQDPQDSRR

SEQ ID NO: 949 - protein, 15 aa, Artificial Sequence
  Synthetic
ASILCKCYTTGTIIN

SEQ ID NO: 950 - protein, 15 aa, Artificial Sequence
  Synthetic
ASPVCQRHSPDCSRL

SEQ ID NO: 951 - protein, 12 aa, Artificial Sequence
  Synthetic
ASQARWTGATRA

SEQ ID NO: 952 - protein, 28 aa, Artificial Sequence
  Synthetic
ASYFNPGGSYYKQYHPTACEVEPAFGHS

SEQ ID NO: 953 - protein, 15 aa, Artificial Sequence
  Synthetic
ASYKVMTRSSHQSLV

SEQ ID NO: 954 - protein, 12 aa, Artificial Sequence
  Synthetic
ASYVKKPKEDVD

SEQ ID NO: 955 - protein, 15 aa, Artificial Sequence
  Synthetic
ATAAQITAGIALHQS

SEQ ID NO: 956 - protein, 8 aa, Artificial Sequence
  Synthetic
ATPERPRL

SEQ ID NO: 957 - protein, 15 aa, Artificial Sequence
  Synthetic
AVCLGGLIGIPALIC

SEQ ID NO: 958 - protein, 11 aa, Artificial Sequence
  Synthetic
AVGPRQAQVSF

SEQ ID NO: 959 - protein, 15 aa, Artificial Sequence
  Synthetic
AVNAYSSGGYAQLAS

SEQ ID NO: 960 - protein, 15 aa, Artificial Sequence
  Synthetic
AVSETRQTWAEWAAA

SEQ ID NO: 961 - protein, 15 aa, Artificial Sequence
  Synthetic
AVTAPDTAADSELRR

SEQ ID NO: 962 - protein, 20 aa, Artificial Sequence
  Synthetic
AVTAPDTAADSELRRWIKYT

SEQ ID NO: 963 - protein, 22 aa, Artificial Sequence
  Synthetic
AYGGIIKDAPPGAGFIYRETFC

SEQ ID NO: 964 - protein, 15 aa, Artificial Sequence
  Synthetic
CALPLAGLLACCAKC

SEQ ID NO: 965 - protein, 15 aa, Artificial Sequence
  Synthetic
CARIWNGTQRACTFW

SEQ ID NO: 966 - protein, 15 aa, Artificial Sequence
  Synthetic
CARTLVSGSFGNRFI

SEQ ID NO: 967 - protein, 22 aa, Artificial Sequence
  Synthetic
CASPYEGRYRDMYDALRBRLLY

SEQ ID NO: 968 - protein, 14 aa, Artificial Sequence
  Synthetic
CAVFVRSGQPVIGA

SEQ ID NO: 969 - protein, 16 aa, Artificial Sequence
  Synthetic
CCAKCLYYLRGAIAPR

SEQ ID NO: 970 - protein, 15 aa, Artificial Sequence
  Synthetic
CCRGRCNKKGEQVGM

SEQ ID NO: 971 - protein, 15 aa, Artificial Sequence
  Synthetic
CEIPTDVSCEGLGAW

SEQ ID NO: 972 - protein, 16 aa, Artificial Sequence
  Synthetic
CFGKDLKRPGSSPMEV

SEQ ID NO: 973 - protein, 15 aa, Artificial Sequence
  Synthetic
CFQQACKGKIQALCE

SEQ ID NO: 974 - protein, 29 aa, Artificial Sequence
  Synthetic
CFQQACKGKIQALCENPEWAPLKDNRIPS

SEQ ID NO: 975 - protein, 15 aa, Artificial Sequence
  Synthetic
CGGESDRASARVIDP

SEQ ID NO: 976 - protein, 22 aa, Artificial Sequence
  Synthetic
CITTIYKTGQPAADHYYSKVTA

SEQ ID NO: 977 - protein, 15 aa, Artificial Sequence
  Synthetic
CKGKIQALCENPEWA

SEQ ID NO: 978 - protein, 13 aa, Artificial Sequence
  Synthetic
CKPWQESRKNKAQ

SEQ ID NO: 979 - protein, 15 aa, Artificial Sequence
  Synthetic
CNKKGEQVGMSRPGL

SEQ ID NO: 980 - protein, 15 aa, Artificial Sequence
  Synthetic
CNVTTEHPFCNTPHG

SEQ ID NO: 981 - protein, 10 aa, Artificial Sequence
  Synthetic
CQVGSSNSAF

SEQ ID NO: 982 - protein, 12 aa, Artificial Sequence
  Synthetic
CSGPTTIRGQFS

SEQ ID NO: 983 - protein, 16 aa, Artificial Sequence
  Synthetic
CTSPYDGKYWSMYSRL

SEQ ID NO: 984 - protein, 15 aa, Artificial Sequence
  Synthetic
CVLADSESGGHITHS

SEQ ID NO: 985 - protein, 24 aa, Artificial Sequence
  Synthetic
CYTTGTIINQDPDKILTYIAADHC

SEQ ID NO: 986 - protein, 8 aa, Artificial Sequence
  Synthetic
DADDPLLR

SEQ ID NO: 987 - protein, 15 aa, Artificial Sequence
  Synthetic
DARAAHLPTGTPLDI

SEQ ID NO: 988 - protein, 20 aa, Artificial Sequence
  Synthetic
DARAAHLPTGTPLDIDTASE

SEQ ID NO: 989 - protein, 15 aa, Artificial Sequence
  Synthetic
DCHAPTYLPAEVDGD

SEQ ID NO: 990 - protein, 15 aa, Artificial Sequence
  Synthetic
DCSRLVGATPERPRL

SEQ ID NO: 991 - protein, 15 aa, Artificial Sequence
  Synthetic
DDKLRMETCFQQACK

SEQ ID NO: 992 - protein, 8 aa, Artificial Sequence
  Synthetic
DDPLLRTA

SEQ ID NO: 993 - protein, 15 aa, Artificial Sequence
  Synthetic
DDPLLRTAPGPGEVW

SEQ ID NO: 994 - protein, 11 aa, Artificial Sequence
  Synthetic
DDPPATVYRYD

SEQ ID NO: 995 - protein, 17 aa, Artificial Sequence
  Synthetic
DDPPATVYRYDSRPPED

SEQ ID NO: 996 - protein, 18 aa, Artificial Sequence
  Synthetic
DDPPATVYRYDSRPPEDV

SEQ ID NO: 997 - protein, 15 aa, Artificial Sequence
  Synthetic
DEVGLRTPQRFTDLV

SEQ ID NO: 998 - protein, 15 aa, Artificial Sequence
  Synthetic
DHCPVVEVNGVTIQV

SEQ ID NO: 999 - protein, 13 aa, Artificial Sequence
  Synthetic
DIDTASESSQDPQ

SEQ ID NO: 1000 - protein, 15 aa, Artificial Sequence
  Synthetic
DINKVLEKLGYSGGD

SEQ ID NO: 1001 - protein, 7 aa, Artificial Sequence
  Synthetic
DLIAYKQ

SEQ ID NO: 1002 - protein, 15 aa, Artificial Sequence
  Synthetic
DLIGQKLGLKLLRYY

SEQ ID NO: 1003 - protein, 19 aa, Artificial Sequence
  Synthetic
DLQKALEAQSRALRAELAA

SEQ ID NO: 1004 - protein, 15 aa, Artificial Sequence
  Synthetic
DLQYVLATYDTSRVE

SEQ ID NO: 1005 - protein, 9 aa, Artificial Sequence
  Synthetic
DLSLRRFMV

SEQ ID NO: 1006 - protein, 15 aa, Artificial Sequence
  Synthetic
DLSNCMVALGELKLA

SEQ ID NO: 1007 - protein, 24 aa, Artificial Sequence
  Synthetic
DLVEYIMNYTGNQQSRWGLGSPNC

SEQ ID NO: 1008 - protein, 15 aa, Artificial Sequence
  Synthetic
DLVKFISDKIKFLNP

SEQ ID NO: 1009 - protein, 15 aa, Artificial Sequence
  Synthetic
DLVKFISTKIKFLNP

SEQ ID NO: 1010 - protein, 10 aa, Artificial Sequence
  Synthetic
DLYKSNHNNV

SEQ ID NO: 1011 - protein, 10 aa, Artificial Sequence
  Synthetic
DNVLDHLTGR

SEQ ID NO: 1012 - protein, 12 aa, Artificial Sequence
  Synthetic
DNVLDHLTGRSC

SEQ ID NO: 1013 - protein, 13 aa, Artificial Sequence
  Synthetic
DNVLDHLTGRSCQ

SEQ ID NO: 1014 - protein, 11 aa, Artificial Sequence
  Synthetic
DPDKILTYIAA

SEQ ID NO: 1015 - protein, 19 aa, Artificial Sequence
  Synthetic
DPGDLVEYIMNYTGNQQSR

SEQ ID NO: 1016 - protein, 8 aa, Artificial Sequence
  Synthetic
DPLLRTAP

SEQ ID NO: 1017 - protein, 22 aa, Artificial Sequence
  Synthetic
DPLLRTAPGPGEVWVTPVIGSQ

SEQ ID NO: 1018 - protein, 13 aa, Artificial Sequence
  Synthetic
DPQDSRRSAEPLL

SEQ ID NO: 1019 - protein, 15 aa, Artificial Sequence
  Synthetic
DPVIDRLYLSSHRGV

SEQ ID NO: 1020 - protein, 15 aa, Artificial Sequence
  Synthetic
DQILRSMKGLSSTSI

SEQ ID NO: 1021 - protein, 15 aa, Artificial Sequence
  Synthetic
DQYCADVAAEELMNA

SEQ ID NO: 1022 - protein, 10 aa, Artificial Sequence
  Synthetic
DSESGGHITH

SEQ ID NO: 1023 - protein, 13 aa, Artificial Sequence
  Synthetic
DTASESSQDPQDS

SEQ ID NO: 1024 - protein, 15 aa, Artificial Sequence
  Synthetic
DTVMSVFALASYVQH

SEQ ID NO: 1025 - protein, 14 aa, Artificial Sequence
  Synthetic
DVFQNGFTAWGNND

SEQ ID NO: 1026 - protein, 15 aa, Artificial Sequence
  Synthetic
DVGAVPPGKFVTAAL

SEQ ID NO: 1027 - protein, 16 aa, Artificial Sequence
  Synthetic
DVNKSKTHISVNGRKI

SEQ ID NO: 1028 - protein, 15 aa, Artificial Sequence
  Synthetic
DVSCEGLGAWVPAAP

SEQ ID NO: 1029 - protein, 27 aa, Artificial Sequence
  Synthetic
DWASPVCQRHSPDCSRLVGATPERPRL

SEQ ID NO: 1030 - protein, 13 aa, Artificial Sequence
  Synthetic
EARESYRETGPSR

SEQ ID NO: 1031 - protein, 13 aa, Artificial Sequence
  Synthetic
EAVEAERAGRGTG

SEQ ID NO: 1032 - protein, 15 aa, Artificial Sequence
  Synthetic
EDAKELLESSDQILR

SEQ ID NO: 1033 - protein, 13 aa, Artificial Sequence
  Synthetic
EDRRVKQSRGEAR

SEQ ID NO: 1034 - protein, 15 aa, Artificial Sequence
  Synthetic
EDSITIPYQGSGKGV

SEQ ID NO: 1035 - protein, 15 aa, Artificial Sequence
  Synthetic
EEAFTYLCTAPGCAT

SEQ ID NO: 1036 - protein, 15 aa, Artificial Sequence
  Synthetic
EGFNMILGTILAQIW

SEQ ID NO: 1037 - protein, 20 aa, Artificial Sequence
  Synthetic
EGFNMILGTILAQIWVLLAK

SEQ ID NO: 1038 - protein, 15 aa, Artificial Sequence
  Synthetic
EHPFCNTPHGQLEVQ

SEQ ID NO: 1039 - protein, 15 aa, Artificial Sequence
  Synthetic
EISDIEVQDPEGFNM

SEQ ID NO: 1040 - protein, 20 aa, Artificial Sequence
  Synthetic
EISDIEVQDPEGFNMILGTI

SEQ ID NO: 1041 - protein, 11 aa, Artificial Sequence
  Synthetic
EKPNLSSKRSE

SEQ ID NO: 1042 - protein, 15 aa, Artificial Sequence
  Synthetic
ELKLAALCHGEDSIT

SEQ ID NO: 1043 - protein, 15 aa, Artificial Sequence
  Synthetic
ELMNALVNSTLLETR

SEQ ID NO: 1044 - protein, 5 aa, Artificial Sequence
  Synthetic
ELPRL

SEQ ID NO: 1045 - protein, 23 aa, Artificial Sequence
  Synthetic
ENPEWAPLKDNRIPSYGVLSVDL

SEQ ID NO: 1046 - protein, 15 aa, Artificial Sequence
  Synthetic
EPIRDALNAMTQNIR

SEQ ID NO: 1047 - protein, 15 aa, Artificial Sequence
  Synthetic
EQVGMSRPGLKPDLT

SEQ ID NO: 1048 - protein, 8 aa, Artificial Sequence
  Synthetic
ERPRLRLV

SEQ ID NO: 1049 - protein, 15 aa, Artificial Sequence
  Synthetic
ERPRLRLVDADDPLL

SEQ ID NO: 1050 - protein, 17 aa, Artificial Sequence
  Synthetic
ESPGQLIQRITDDPDVS

SEQ ID NO: 1051 - protein, 15 aa, Artificial Sequence
  Synthetic
ESRGIKARITHVDTE

SEQ ID NO: 1052 - protein, 15 aa, Artificial Sequence
  Synthetic
ESSCTFMPEGTVCSQ

SEQ ID NO: 1053 - protein, 13 aa, Artificial Sequence
  Synthetic
ESSQDPQDSRRSA

SEQ ID NO: 1054 - protein, 15 aa, Artificial Sequence
  Synthetic
ETRTTNQFLAVSKGN

SEQ ID NO: 1055 - protein, 15 aa, Artificial Sequence
  Synthetic
EVDGDVKLSSNLVIL

SEQ ID NO: 1056 - protein, 9 aa, Artificial Sequence
  Synthetic
EVNGVTIQV

SEQ ID NO: 1057 - protein, 8 aa, Artificial Sequence
  Synthetic
EVWVTPVI

SEQ ID NO: 1058 - protein, 12 aa, Artificial Sequence
  Synthetic
EVWVTPVIGSQA

SEQ ID NO: 1059 - protein, 15 aa, Artificial Sequence
  Synthetic
EWAAAHWWQLTLGAT

SEQ ID NO: 1060 - protein, 15 aa, Artificial Sequence
  Synthetic
EWIPRFKVSPYLFTV

SEQ ID NO: 1061 - protein, 12 aa, Artificial Sequence
  Synthetic
FEYVDTYGDNAG

SEQ ID NO: 1062 - protein, 15 aa, Artificial Sequence
  Synthetic
FGPLITHGSGMDLYK

SEQ ID NO: 1063 - protein, 9 aa, Artificial Sequence
  Synthetic
FIFDALAEV

SEQ ID NO: 1064 - protein, 9 aa, Artificial Sequence
  Synthetic
FISDKIKFL

SEQ ID NO: 1065 - protein, 15 aa, Artificial Sequence
  Synthetic
FKRNKDKPPITSGSG

SEQ ID NO: 1066 - protein, 20 aa, Artificial Sequence
  Synthetic
FKRNKDKPPITSGSGGAIRG

SEQ ID NO: 1067 - protein, 15 aa, Artificial Sequence
  Synthetic
FKTVRPVALPRTLAP

SEQ ID NO: 1068 - protein, 9 aa, Artificial Sequence
  Synthetic
FLMDRHIIV

SEQ ID NO: 1069 - protein, 15 aa, Artificial Sequence
  Synthetic
FMAVLLTLQTPTGQI

SEQ ID NO: 1070 - protein, 15 aa, Artificial Sequence
  Synthetic
FMPEGTVCSQNALYP

SEQ ID NO: 1071 - protein, 9 aa, Artificial Sequence
  Synthetic
FMYMSLLGV

SEQ ID NO: 1072 - protein, 15 aa, Artificial Sequence
  Synthetic
FNVPIKEAGEDCHAP

SEQ ID NO: 1073 - protein, 15 aa, Artificial Sequence
  Synthetic
FRDLTWCINPPERIK

SEQ ID NO: 1074 - protein, 15 aa, Artificial Sequence
  Synthetic
FSHDDPISSDQSRFG

SEQ ID NO: 1075 - protein, 20 aa, Artificial Sequence
  Synthetic
FSHDDPISSDQSRFGWFENK

SEQ ID NO: 1076 - protein, 15 aa, Artificial Sequence
  Synthetic
FTDLVKFISDKIKFL

SEQ ID NO: 1077 - protein, 15 aa, Artificial Sequence
  Synthetic
FTWDQKLWCRHFCVL

SEQ ID NO: 1078 - protein, 32 aa, Artificial Sequence
  Synthetic
FVRDGQSVIGACASPYEGRYRDLYDALRRLLY

SEQ ID NO: 1079 - protein, 33 aa, Artificial Sequence
  Synthetic
FVRSGQPVIGACTSPYDGKYWSILYSRLRKMLY

SEQ ID NO: 1080 - protein, 15 aa, Artificial Sequence
  Synthetic
FYKDNPHPKGSRIVI

SEQ ID NO: 1081 - protein, 14 aa, Artificial Sequence
  Synthetic
GAASSYFEYVDTYG

SEQ ID NO: 1082 - protein, 21 aa, Artificial Sequence
  Synthetic
GAFDLKTTFCIMTTRNTGQPA

SEQ ID NO: 1083 - protein, 15 aa, Artificial Sequence
  Synthetic
GALIGILSLFVESPG

SEQ ID NO: 1084 - protein, 20 aa, Artificial Sequence
  Synthetic
GALIGILSLFVESPGQLIQR

SEQ ID NO: 1085 - protein, 8 aa, Artificial Sequence
  Synthetic
GATPERPR

SEQ ID NO: 1086 - protein, 24 aa, Artificial Sequence
  Synthetic
GAYGRCPNGTRALTVAELRGNAEL

SEQ ID NO: 1087 - protein, 15 aa, Artificial Sequence
  Synthetic
GCFAPWDLEATGACI

SEQ ID NO: 1088 - protein, 13 aa, Artificial Sequence
  Synthetic
GDINKVLEKLGYS

SEQ ID NO: 1089 - protein, 19 aa, Artificial Sequence
  Synthetic
GDINKVLEKLGYSGGDLLG

SEQ ID NO: 1090 - protein, 13 aa, Artificial Sequence
  Synthetic
GDLRAVHHRPVPA

SEQ ID NO: 1091 - protein, 15 aa, Artificial Sequence
  Synthetic
GDLVEYIMNYTGNQQ

SEQ ID NO: 1092 - protein, 15 aa, Artificial Sequence
  Synthetic
GDSSITTRSRLLDRL

SEQ ID NO: 1093 - protein, 20 aa, Artificial Sequence
  Synthetic
GDSSITTRSRLLDRLVRLIG

SEQ ID NO: 1094 - protein, 15 aa, Artificial Sequence
  Synthetic
GEDCHAPTYLPAEVD

SEQ ID NO: 1095 - protein, 15 aa, Artificial Sequence
  Synthetic
GELSTLESLMNLYQQ

SEQ ID NO: 1096 - protein, 20 aa, Artificial Sequence
  Synthetic
GELSTLESLMNLYQQMGKPA

SEQ ID NO: 1097 - protein, 12 aa, Artificial Sequence
  Synthetic
GEQARYLALLEA

SEQ ID NO: 1098 - protein, 6 aa, Artificial Sequence
  Synthetic
GEVWVT

SEQ ID NO: 1099 - protein, 8 aa, Artificial Sequence
  Synthetic
GEVWVTPV

SEQ ID NO: 1100 - protein, 14 aa, Artificial Sequence
  Synthetic
GEVWVTPVIGSQAR

SEQ ID NO: 1101 - protein, 15 aa, Artificial Sequence
  Synthetic
GEYGGVIKDGTPGGA

SEQ ID NO: 1102 - protein, 17 aa, Artificial Sequence
  Synthetic
GFLSGVGPMRLRHGADT

SEQ ID NO: 1103 - protein, 22 aa, Artificial Sequence
  Synthetic
GFRASDVETAEGGEIHELLRLQ

SEQ ID NO: 1104 - protein, 25 aa, Artificial Sequence
  Synthetic
GGAVPGGAVPGGAVPGGFGPGGFGP

SEQ ID NO: 1105 - protein, 25 aa, Artificial Sequence
  Synthetic
GGAVPGGAVPGGFGPGGFGPGGFGP

SEQ ID NO: 1106 - protein, 30 aa, Artificial Sequence
  Synthetic
GGAVPGGAVPGGFGPGGFGPGGFGPGGFGP

SEQ ID NO: 1107 - protein, 15 aa, Artificial Sequence
  Synthetic
GGHITHSGMVGMGVS

SEQ ID NO: 1108 - protein, 20 aa, Artificial Sequence
  Synthetic
GILESRGIKARITHVDTESY

SEQ ID NO: 1109 - protein, 17 aa, Artificial Sequence
  Synthetic
GITGETTTTEYSNARYV

SEQ ID NO: 1110 - protein, 13 aa, Artificial Sequence
  Synthetic
GKEDRRVKQSRGE

SEQ ID NO: 1111 - protein, 7 aa, Artificial Sequence
  Synthetic
GKVTNGS

SEQ ID NO: 1112 - protein, 15 aa, Artificial Sequence
  Synthetic
GLGAWVPAAPCARIW

SEQ ID NO: 1113 - protein, 15 aa, Artificial Sequence
  Synthetic
GLIGIPALICCCRGR

SEQ ID NO: 1114 - protein, 20 aa, Artificial Sequence
  Synthetic
GLLACCAKCLYYLRGAIAPR

SEQ ID NO: 1115 - protein, 15 aa, Artificial Sequence
  Synthetic
GLLAIAGIRLHRAAI

SEQ ID NO: 1116 - protein, 16 aa, Artificial Sequence
  Synthetic
GLQPRADMAAPPTLPQ

SEQ ID NO: 1117 - protein, 17 aa, Artificial Sequence
  Synthetic
GMGVSCTVTREDGTNRR

SEQ ID NO: 1118 - protein, 12 aa, Artificial Sequence
  Synthetic
GMYGGTYLVEKP

SEQ ID NO: 1119 - protein, 28 aa, Artificial Sequence
  Synthetic
GNAELQTYLRQITPGWSIYGLYDGTYLG

SEQ ID NO: 1120 - protein, 15 aa, Artificial Sequence
  Synthetic
GNCHLTVNGEDVGAV

SEQ ID NO: 1121 - protein, 13 aa, Artificial Sequence
  Synthetic
GNNDNVLDHLTGR

SEQ ID NO: 1122 - protein, 15 aa, Artificial Sequence
  Synthetic
GNNDNVLDHLTGRSC

SEQ ID NO: 1123 - protein, 15 aa, Artificial Sequence
  Synthetic
GNRFILSQGNLIANC

SEQ ID NO: 1124 - protein, 34 aa, Artificial Sequence
  Synthetic
GNRGRGQRRDWSRAPPPPEERQETRSQTPAPKPS

SEQ ID NO: 1125 - protein, 8 aa, Artificial Sequence
  Synthetic
GPGEVWVT

SEQ ID NO: 1126 - protein, 17 aa, Artificial Sequence
  Synthetic
GPMRLRHGADTRCGRLI

SEQ ID NO: 1127 - protein, 7 aa, Artificial Sequence
  Synthetic
GPNHTKV

SEQ ID NO: 1128 - protein, 9 aa, Artificial Sequence
  Synthetic
GPRQAQVSF

SEQ ID NO: 1129 - protein, 15 aa, Artificial Sequence
  Synthetic
GPRQAQVSFLQGDQS

SEQ ID NO: 1130 - protein, 20 aa, Artificial Sequence
  Synthetic
GPRQAQVSFLQGDQSENELP

SEQ ID NO: 1131 - protein, 15 aa, Artificial Sequence
  Synthetic
GRGYNVSSIVTMTSQ

SEQ ID NO: 1132 - protein, 7 aa, Artificial Sequence
  Synthetic
GRTPFII

SEQ ID NO: 1133 - protein, 15 aa, Artificial Sequence
  Synthetic
GSPNCHGPDWASPVC

SEQ ID NO: 1134 - protein, 15 aa, Artificial Sequence
  Synthetic
GSQARKCGLHIRAGP

SEQ ID NO: 1135 - protein, 15 aa, Artificial Sequence
  Synthetic
GSSNSAFVSTSSSRR

SEQ ID NO: 1136 - protein, 15 aa, Artificial Sequence
  Synthetic
GSTKSCARTLVSGSF

SEQ ID NO: 1137 - protein, 15 aa, Artificial Sequence
  Synthetic
GSYYKQYHPTACEVE

SEQ ID NO: 1138 - protein, 15 aa, Artificial Sequence
  Synthetic
GTHTTAVSETRQTWA

SEQ ID NO: 1139 - protein, 15 aa, Artificial Sequence
  Synthetic
GTIINQDPDKILTYI

SEQ ID NO: 1140 - protein, 11 aa, Artificial Sequence
  Synthetic
GTLVRMAPVIG

SEQ ID NO: 1141 - protein, 13 aa, Artificial Sequence
  Synthetic
GTPLDIDTASESS

SEQ ID NO: 1142 - protein, 28 aa, Artificial Sequence
  Synthetic
GTYLGQAYGGIIKDAPPGAGFIYRETFC

SEQ ID NO: 1143 - protein, 17 aa, Artificial Sequence
  Synthetic
GVATKGLGVHAKSSDWG

SEQ ID NO: 1144 - protein, 20 aa, Artificial Sequence
  Synthetic
GVLLPTIPGKLDVNKSKTHI

SEQ ID NO: 1145 - protein, 15 aa, Artificial Sequence
  Synthetic
GVLSVDLSLTVELKI

SEQ ID NO: 1146 - protein, 15 aa, Artificial Sequence
  Synthetic
GVPIELQVECFTWDQ

SEQ ID NO: 1147 - protein, 15 aa, Artificial Sequence
  Synthetic
GVSCTVTREDGTNRR

SEQ ID NO: 1148 - protein, 15 aa, Artificial Sequence
  Synthetic
GVSYNIGSQEWYTTV

SEQ ID NO: 1149 - protein, 15 aa, Artificial Sequence
  Synthetic
GYNVSSIVTMTSQGM

SEQ ID NO: 1150 - protein, 15 aa, Artificial Sequence
  Synthetic
HFCVLADSESGGHIT

SEQ ID NO: 1151 - protein, 15 aa, Artificial Sequence
  Synthetic
HGEDSITIPYQGSGK

SEQ ID NO: 1152 - protein, 8 aa, Artificial Sequence
  Synthetic
HGPDWASP

SEQ ID NO: 1153 - protein, 15 aa, Artificial Sequence
  Synthetic
HGPDWASPVCQRHSP

SEQ ID NO: 1154 - protein, 22 aa, Artificial Sequence
  Synthetic
HGPDWASPVCQRHSPDCSRLVG

SEQ ID NO: 1155 - protein, 33 aa, Artificial Sequence
  Synthetic
HGPDWASPVCQRHSPDCSRLVGATPERPRLRLV

SEQ ID NO: 1156 - protein, 15 aa, Artificial Sequence
  Synthetic
HITHSGMEGMGVSCT

SEQ ID NO: 1157 - protein, 15 aa, Artificial Sequence
  Synthetic
HKSLSTNLDVTNSIE

SEQ ID NO: 1158 - protein, 9 aa, Artificial Sequence
  Synthetic
HLMIDRPYV

SEQ ID NO: 1159 - protein, 13 aa, Artificial Sequence
  Synthetic
HLPTGTPLDIDTA

SEQ ID NO: 1160 - protein, 24 aa, Artificial Sequence
  Synthetic
HLPTGTPLDIDTATESSQDPQDSR

SEQ ID NO: 1161 - protein, 15 aa, Artificial Sequence
  Synthetic
HMTNYLEQPVSNDLS

SEQ ID NO: 1162 - protein, 15 aa, Artificial Sequence
  Synthetic
HQSLVIKLMPNITLL

SEQ ID NO: 1163 - protein, 15 aa, Artificial Sequence
  Synthetic
HRAAIYTAEIHKSLS

SEQ ID NO: 1164 - protein, 18 aa, Artificial Sequence
  Synthetic
HRMQEAVEAERAGRGTGH

SEQ ID NO: 1165 - protein, 15 aa, Artificial Sequence
  Synthetic
HVDTESYFIVLSIAY

SEQ ID NO: 1166 - protein, 15 aa, Artificial Sequence
  Synthetic
HWGNLSKIGVVGIGS

SEQ ID NO: 1167 - protein, 15 aa, Artificial Sequence
  Synthetic
HWWQLTLGATCALPL

SEQ ID NO: 1168 - protein, 23 aa, Artificial Sequence
  Synthetic
HYRNASDVLPGHWLQGGWGCYNL

SEQ ID NO: 1169 - protein, 15 aa, Artificial Sequence
  Synthetic
IDLGPPISLERLDVG

SEQ ID NO: 1170 - protein, 15 aa, Artificial Sequence
  Synthetic
IEAIRQAGQEMILAV

SEQ ID NO: 1171 - protein, 9 aa, Artificial Sequence
  Synthetic
IETRSARHP

SEQ ID NO: 1172 - protein, 15 aa, Artificial Sequence
  Synthetic
IGSQEWYTTVPKYVA

SEQ ID NO: 1173 - protein, 15 aa, Artificial Sequence
  Synthetic
IKGVIVHRLEGVSYN

SEQ ID NO: 1174 - protein, 15 aa, Artificial Sequence
  Synthetic
IKHIIIVPIPGDSSI

SEQ ID NO: 1175 - protein, 20 aa, Artificial Sequence
  Synthetic
IKHIIIVPIPGDSSITTRSR

SEQ ID NO: 1176 - protein, 7 aa, Artificial Sequence
  Synthetic
IKLKDCP

SEQ ID NO: 1177 - protein, 15 aa, Artificial Sequence
  Synthetic
IKLMPNITLLNNCTR

SEQ ID NO: 1178 - protein, 10 aa, Artificial Sequence
  Synthetic
ILLERLDVGT

SEQ ID NO: 1179 - protein, 10 aa, Artificial Sequence
  Synthetic
ILPGQDLQYV

SEQ ID NO: 1180 - protein, 15 aa, Artificial Sequence
  Synthetic
ILTYIAADHCPVVEV

SEQ ID NO: 1181 - protein, 11 aa, Artificial Sequence
  Synthetic
INQDPDKILTY

SEQ ID NO: 1182 - protein, 15 aa, Artificial Sequence
  Synthetic
IPRFKVSPYLFNVPI

SEQ ID NO: 1183 - protein, 15 aa, Artificial Sequence
  Synthetic
IQALSYALGGDINKV

SEQ ID NO: 1184 - protein, 15 aa, Artificial Sequence
  Synthetic
IRAGPYGHATVEMPE

SEQ ID NO: 1185 - protein, 7 aa, Artificial Sequence
  Synthetic
IRMGTDK

SEQ ID NO: 1186 - protein, 15 aa, Artificial Sequence
  Synthetic
ISNFDESSCTFMPEG

SEQ ID NO: 1187 - protein, 15 aa, Artificial Sequence
  Synthetic
ITAGIALHQSMLNSQ

SEQ ID NO: 1188 - protein, 15 aa, Artificial Sequence
  Synthetic
ITDDPDVSIRLLEVV

SEQ ID NO: 1189 - protein, 20 aa, Artificial Sequence
  Synthetic
ITDDPDVSIRLLEVVQSDQS

SEQ ID NO: 1190 - protein, 5 aa, Artificial Sequence
  Synthetic
ITTYV

SEQ ID NO: 1191 - protein, 15 aa, Artificial Sequence
  Synthetic
IVEAGLASFILTIKF

SEQ ID NO: 1192 - protein, 20 aa, Artificial Sequence
  Synthetic
IVEAGLASFILTIKFGIETM

SEQ ID NO: 1193 - protein, 25 aa, Artificial Sequence
  Synthetic
IVEAGLASFILTIKFGIETMYPALG

SEQ ID NO: 1194 - protein, 16 aa, Artificial Sequence
  Synthetic
KALEAQSRALRAELAA

SEQ ID NO: 1195 - protein, 15 aa, Artificial Sequence
  Synthetic
KARITHVDTESYFIV

SEQ ID NO: 1196 - protein, 15 aa, Artificial Sequence
  Synthetic
KCGLHIRAGPYGHAT

SEQ ID NO: 1197 - protein, 15 aa, Artificial Sequence
  Synthetic
KCYTTGTIINQDPDK

SEQ ID NO: 1198 - protein, 10 aa, Artificial Sequence
  Synthetic
KDNPHPKGSR

SEQ ID NO: 1199 - protein, 15 aa, Artificial Sequence
  Synthetic
KDNRIPSYGVLSVDL

SEQ ID NO: 1200 - protein, 15 aa, Artificial Sequence
  Synthetic
KFLNPDREYDFRDLT

SEQ ID NO: 1201 - protein, 9 aa, Artificial Sequence
  Synthetic
KFVTAALLN

SEQ ID NO: 1202 - protein, 11 aa, Artificial Sequence
  Synthetic
KGNCSGPTTIR

SEQ ID NO: 1203 - protein, 15 aa, Artificial Sequence
  Synthetic
KIKFLNPDREYDFRD

SEQ ID NO: 1204 - protein, 15 aa, Artificial Sequence
  Synthetic
KIVDGGCFAPWDLEA

SEQ ID NO: 1205 - protein, 15 aa, Artificial Sequence
  Synthetic
KLGLKLLRYYTEILS

SEQ ID NO: 1206 - protein, 15 aa, Artificial Sequence
  Synthetic
KLGVWKSPTDMQSWV

SEQ ID NO: 1207 - protein, 7 aa, Artificial Sequence
  Synthetic
KLKECPQ

SEQ ID NO: 1208 - protein, 9 aa, Artificial Sequence
  Synthetic
KLLRYYTEI

SEQ ID NO: 1209 - protein, 10 aa, Artificial Sequence
  Synthetic
KLMPFSGDFV

SEQ ID NO: 1210 - protein, 9 aa, Artificial Sequence
  Synthetic
KLMPNITLL

SEQ ID NO: 1211 - protein, 26 aa, Artificial Sequence
  Synthetic
KLRMETCFQQACKGKIQALCENPEWA

SEQ ID NO: 1212 - protein, 9 aa, Artificial Sequence
  Synthetic
KLWCRHFCV

SEQ ID NO: 1213 - protein, 10 aa, Artificial Sequence
  Synthetic
KLWCRHFCVL

SEQ ID NO: 1214 - protein, 9 aa, Artificial Sequence
  Synthetic
KLWESPQEI

SEQ ID NO: 1215 - protein, 9 aa, Artificial Sequence
  Synthetic
KMSSAVGFV

SEQ ID NO: 1216 - protein, 17 aa, Artificial Sequence
  Synthetic
KMSSAVGFVPDTGPASR

SEQ ID NO: 1217 - protein, 7 aa, Artificial Sequence
  Synthetic
KMVYATN

SEQ ID NO: 1218 - protein, 15 aa, Artificial Sequence
  Synthetic
KPDLTGTSKSYVRSL

SEQ ID NO: 1219 - protein, 15 aa, Artificial Sequence
  Synthetic
KPNLSSKRSELSQLS

SEQ ID NO: 1220 - protein, 20 aa, Artificial Sequence
  Synthetic
KPNLSSKRSELSQLSMYRVF

SEQ ID NO: 1221 - protein, 15 aa, Artificial Sequence
  Synthetic
KQSRGEARESYRETG

SEQ ID NO: 1222 - protein, 20 aa, Artificial Sequence
  Synthetic
KQSRGEARESYRETGPSRAS

SEQ ID NO: 1223 - protein, 15 aa, Artificial Sequence
  Synthetic
KRFAGVVLAGAALGV

SEQ ID NO: 1224 - protein, 15 aa, Artificial Sequence
  Synthetic
KRTPGNKPRIAEMIC

SEQ ID NO: 1225 - protein, 20 aa, Artificial Sequence
  Synthetic
KRTPGNKPRIAEMICDIDTY

SEQ ID NO: 1226 - protein, 26 aa, Artificial Sequence
  Synthetic
KSNHNNVYWLTIPPMKNLALGVINTL

SEQ ID NO: 1227 - protein, 9 aa, Artificial Sequence
  Synthetic
KVSPYLFNV

SEQ ID NO: 1228 - protein, 17 aa, Artificial Sequence
  Synthetic
KVVQLPKISKNALKANG

SEQ ID NO: 1229 - protein, 17 aa, Artificial Sequence
  Synthetic
KVVQLPKISKNALRNDG

SEQ ID NO: 1230 - protein, 12 aa, Artificial Sequence
  Synthetic
LAHRRIPPENIR

SEQ ID NO: 1231 - protein, 12 aa, Artificial Sequence
  Synthetic
LALALWAGFALS

SEQ ID NO: 1232 - protein, 15 aa, Artificial Sequence
  Synthetic
LAPGGGNCHLTVNGE

SEQ ID NO: 1233 - protein, 15 aa, Artificial Sequence
  Synthetic
LAQIWVLLAKAVTAP

SEQ ID NO: 1234 - protein, 20 aa, Artificial Sequence
  Synthetic
LAQIWVLLAKAVTAPDTAAD

SEQ ID NO: 1235 - protein, 29 aa, Artificial Sequence
  Synthetic
LASYFNPGGSYYKQYHPTACEVEPAFGHS

SEQ ID NO: 1236 - protein, 15 aa, Artificial Sequence
  Synthetic
LAVSKGNCSGPTTIR

SEQ ID NO: 1237 - protein, 15 aa, Artificial Sequence
  Synthetic
LCENPEWAPLKDNRI

SEQ ID NO: 1238 - protein, 9 aa, Artificial Sequence
  Synthetic
LDRLVRLIG

SEQ ID NO: 1239 - protein, 9 aa, Artificial Sequence
  Synthetic
LEEEGVTPL

SEQ ID NO: 1240 - protein, 22 aa, Artificial Sequence
  Synthetic
LEHRMQEAVEAERAGRGTGHFI

SEQ ID NO: 1241 - protein, 15 aa, Artificial Sequence
  Synthetic
LEKLGYSGGDLLGIL

SEQ ID NO: 1242 - protein, 10 aa, Artificial Sequence
  Synthetic
LEQPVSNDLS

SEQ ID NO: 1243 - protein, 15 aa, Artificial Sequence
  Synthetic
LERKWLDVVRNIIAE

SEQ ID NO: 1244 - protein, 20 aa, Artificial Sequence
  Synthetic
LERKWLDVVRNIIAEDLSLR

SEQ ID NO: 1245 - protein, 15 aa, Artificial Sequence
  Synthetic
LFGPSLRDPISAEIS

SEQ ID NO: 1246 - protein, 15 aa, Artificial Sequence
  Synthetic
LGELKLAALCHGEDS

SEQ ID NO: 1247 - protein, 13 aa, Artificial Sequence
  Synthetic
LGGKEDRRVKQSR

SEQ ID NO: 1248 - protein, 24 aa, Artificial Sequence
  Synthetic
LGHDGHHGGTLRVGQHHRNASDVL

SEQ ID NO: 1249 - protein, 20 aa, Artificial Sequence
  Synthetic
LGSPNCHGPDWASPVCQRHS

SEQ ID NO: 1250 - protein, 27 aa, Artificial Sequence
  Synthetic
LGSPNCHGPDWASPVCQRHSPDCSRLV

SEQ ID NO: 1251 - protein, 18 aa, Artificial Sequence
  Synthetic
LHDPDTEAPTEACVTSWL

SEQ ID NO: 1252 - protein, 15 aa, Artificial Sequence
  Synthetic
LIANCASILCKCYTT

SEQ ID NO: 1253 - protein, 24 aa, Artificial Sequence
  Synthetic
LIGLLAIAGIRLHRAAIYTAEIHK

SEQ ID NO: 1254 - protein, 15 aa, Artificial Sequence
  Synthetic
LIPSMNQLSCDLIGQ

SEQ ID NO: 1255 - protein, 15 aa, Artificial Sequence
  Synthetic
LKIKIASGFGPLITH

SEQ ID NO: 1256 - protein, 23 aa, Artificial Sequence
  Synthetic
LKIKIASGFGPLITHGSGMDLYK

SEQ ID NO: 1257 - protein, 7 aa, Artificial Sequence
  Synthetic
LKLYFEP

SEQ ID NO: 1258 - protein, 10 aa, Artificial Sequence
  Synthetic
LLAVLFVMFL

SEQ ID NO: 1259 - protein, 15 aa, Artificial Sequence
  Synthetic
LLDRLVRLIGNPDVS

SEQ ID NO: 1260 - protein, 20 aa, Artificial Sequence
  Synthetic
LLDRLVRLIGNPDVSGPKLT

SEQ ID NO: 1261 - protein, 15 aa, Artificial Sequence
  Synthetic
LLESSDQILRSMKGL

SEQ ID NO: 1262 - protein, 15 aa, Artificial Sequence
  Synthetic
LLETRTTNQFLAVSK

SEQ ID NO: 1263 - protein, 15 aa, Artificial Sequence
  Synthetic
LLEVVQSDQSQSGLT

SEQ ID NO: 1264 - protein, 19 aa, Artificial Sequence
  Synthetic
LLEVVQSDQSQSGLTFASR

SEQ ID NO: 1265 - protein, 20 aa, Artificial Sequence
  Synthetic
LLEVVQSDQSQSGLTFASRG

SEQ ID NO: 1266 - protein, 15 aa, Artificial Sequence
  Synthetic
LLGILESRGIKARIT

SEQ ID NO: 1267 - protein, 8 aa, Artificial Sequence
  Synthetic
LLRTAPGP

SEQ ID NO: 1268 - protein, 15 aa, Artificial Sequence
  Synthetic
LLRYYTEILSLFGPS

SEQ ID NO: 1269 - protein, 20 aa, Artificial Sequence
  Synthetic
LLVPWVLIFMVCRRACRRRG

SEQ ID NO: 1270 - protein, 10 aa, Artificial Sequence
  Synthetic
LLWRSRCKIV

SEQ ID NO: 1271 - protein, 9 aa, Artificial Sequence
  Synthetic
LLWSYAMGV

SEQ ID NO: 1272 - protein, 15 aa, Artificial Sequence
  Synthetic
LLWSYAMGVGVELEN

SEQ ID NO: 1273 - protein, 20 aa, Artificial Sequence
  Synthetic
LLWSYAMGVGVELENSMGGL

SEQ ID NO: 1274 - protein, 9 aa, Artificial Sequence
  Synthetic
LMIDRPYVL

SEQ ID NO: 1275 - protein, 15 aa, Artificial Sequence
  Synthetic
LNAMTQNIRPVQSVA

SEQ ID NO: 1276 - protein, 15 aa, Artificial Sequence
  Synthetic
LNTPPPYQVSCGGES

SEQ ID NO: 1277 - protein, 15 aa, Artificial Sequence
  Synthetic
LRDPISAEISIQALS

SEQ ID NO: 1278 - protein, 16 aa, Artificial Sequence
  Synthetic
LRGSGDLQEYLRHVTR

SEQ ID NO: 1279 - protein, 8 aa, Artificial Sequence
  Synthetic
LRLVDADD

SEQ ID NO: 1280 - protein, 12 aa, Artificial Sequence
  Synthetic
LRLVDADDPLLR

SEQ ID NO: 1281 - protein, 31 aa, Artificial Sequence
  Synthetic
LRLVDADDPLLRTAPGPGEVWVTPVIGSQAR

SEQ ID NO: 1282 - protein, 28 aa, Artificial Sequence
  Synthetic
LRRLLYMIYMSGLAVRVHVSKEEQYYDY

SEQ ID NO: 1283 - protein, 8 aa, Artificial Sequence
  Synthetic
LRTAPGPG

SEQ ID NO: 1284 - protein, 20 aa, Artificial Sequence
  Synthetic
LRVGQHYRNASDVLPGHWLQ

SEQ ID NO: 1285 - protein, 5 aa, Artificial Sequence
  Synthetic
LRYLA

SEQ ID NO: 1286 - protein, 13 aa, Artificial Sequence
  Synthetic
LSCKPWQESRKNK

SEQ ID NO: 1287 - protein, 15 aa, Artificial Sequence
  Synthetic
LSEIKGVIVHRLEGV

SEQ ID NO: 1288 - protein, 15 aa, Artificial Sequence
  Synthetic
LSIAYPTLSEIKGVI

SEQ ID NO: 1289 - protein, 15 aa, Artificial Sequence
  Synthetic
LSLLDLYLGRGYNVS

SEQ ID NO: 1290 - protein, 15 aa, Artificial Sequence
  Synthetic
LSQGNLIANCASILC

SEQ ID NO: 1291 - protein, 15 aa, Artificial Sequence
  Synthetic
LSSHRGVIADNQAKW

SEQ ID NO: 1292 - protein, 15 aa, Artificial Sequence
  Synthetic
LSVDLSLTVELKIKI

SEQ ID NO: 1293 - protein, 14 aa, Artificial Sequence
  Synthetic
LTGISICNPGSSLC

SEQ ID NO: 1294 - protein, 15 aa, Artificial Sequence
  Synthetic
LTIKFGIETMYPALG

SEQ ID NO: 1295 - protein, 20 aa, Artificial Sequence
  Synthetic
LTIKFGIETMYPALGLHEFA

SEQ ID NO: 1296 - protein, 15 aa, Artificial Sequence
  Synthetic
LTLQTPTGQIHWGNL

SEQ ID NO: 1297 - protein, 8 aa, Artificial Sequence
  Synthetic
LVDADDPL

SEQ ID NO: 1298 - protein, 10 aa, Artificial Sequence
  Synthetic
LVDADDPLLR

SEQ ID NO: 1299 - protein, 15 aa, Artificial Sequence
  Synthetic
LVEKPNLSSKRSELS

SEQ ID NO: 1300 - protein, 7 aa, Artificial Sequence
  Synthetic
LVGATPE

SEQ ID NO: 1301 - protein, 8 aa, Artificial Sequence
  Synthetic
LVGATPER

SEQ ID NO: 1302 - protein, 15 aa, Artificial Sequence
  Synthetic
LVKLGVWKSPTGMQS

SEQ ID NO: 1303 - protein, 18 aa, Artificial Sequence
  Synthetic
LVSGSFGNRFILSQGNLI

SEQ ID NO: 1304 - protein, 15 aa, Artificial Sequence
  Synthetic
LYKSNHNNVYWLTIP

SEQ ID NO: 1305 - protein, 25 aa, Artificial Sequence
  Synthetic
LYPMSPLLQECLRGSTKSCARTLVS

SEQ ID NO: 1306 - protein, 18 aa, Artificial Sequence
  Synthetic
MASTTPITMEDLQKALEA

SEQ ID NO: 1307 - protein, 21 aa, Artificial Sequence
  Synthetic
MASTTPITMEDLQKALEAQSR

SEQ ID NO: 1308 - protein, 29 aa, Artificial Sequence
  Synthetic
MASTTPITMEDLQKALEAQSRALRAELAA

SEQ ID NO: 1309 - protein, 29 aa, Artificial Sequence
  Synthetic
MASTTPITMEDLQKALEAQSRALRAGLAA

SEQ ID NO: 1310 - protein, 29 aa, Artificial Sequence
  Synthetic
MASTTPITMEDLQKALETQSRVLRAGLTA

SEQ ID NO: 1311 - protein, 15 aa, Artificial Sequence
  Synthetic
MATLLRSLALFKRNK

SEQ ID NO: 1312 - protein, 20 aa, Artificial Sequence
  Synthetic
MATLLRSLALFKRNKDKPPI

SEQ ID NO: 1313 - protein, 15 aa, Artificial Sequence
  Synthetic
MDLYKSNHNNVYWLT

SEQ ID NO: 1314 - protein, 14 aa, Artificial Sequence
  Synthetic
MEDLQKALEAQSRA

SEQ ID NO: 1315 - protein, 21 aa, Artificial Sequence
  Synthetic
MEDLQKALEAQSRALRAELAA

SEQ ID NO: 1316 - protein, 15 aa, Artificial Sequence
  Synthetic
MGLKVNVSAIFMAVL

SEQ ID NO: 1317 - protein, 15 aa, Artificial Sequence
  Synthetic
MIDRPYVLLAVLFVM

SEQ ID NO: 1318 - protein, 15 aa, Artificial Sequence
  Synthetic
MILAVQGVQDYINNE

SEQ ID NO: 1319 - protein, 15 aa, Artificial Sequence
  Synthetic
MLNSQAIDNLRASLE

SEQ ID NO: 1320 - protein, 15 aa, Artificial Sequence
  Synthetic
MNALVNSTLLETRTT

SEQ ID NO: 1321 - protein, 32 aa, Artificial Sequence
  Synthetic
MNYTGNQQSRWGLGSPNCHGPDWASPVCQRHS

SEQ ID NO: 1322 - protein, 15 aa, Artificial Sequence
  Synthetic
MQSWVPLSTDDPVID

SEQ ID NO: 1323 - protein, 15 aa, Artificial Sequence
  Synthetic
MSLSLLDLYLGRGYN

SEQ ID NO: 1324 - protein, 15 aa, Artificial Sequence
  Synthetic
MSPLLQECLRGSTKS

SEQ ID NO: 1325 - protein, 15 aa, Artificial Sequence
  Synthetic
MSPQRDRINAFYKDN

SEQ ID NO: 1326 - protein, 15 aa, Artificial Sequence
  Synthetic
MYRVFEVSVIRNPGL

SEQ ID NO: 1327 - protein, 15 aa, Artificial Sequence
  Synthetic
NALYPMSPLLQECLR

SEQ ID NO: 1328 - protein, 26 aa, Artificial Sequence
  Synthetic
NCHGPDWASPVCQRHSPDCSRLVGAT

SEQ ID NO: 1329 - protein, 15 aa, Artificial Sequence
  Synthetic
NFGRSYFDPAYFRLG

SEQ ID NO: 1330 - protein, 20 aa, Artificial Sequence
  Synthetic
NFGRSYFDPAYFRLGQEMVR

SEQ ID NO: 1331 - protein, 15 aa, Artificial Sequence
  Synthetic
NGTQRACTFWAVNAY

SEQ ID NO: 1332 - protein, 15 aa, Artificial Sequence
  Synthetic
NGVTIQVGSRRYPDA

SEQ ID NO: 1333 - protein, 15 aa, Artificial Sequence
  Synthetic
NIIAEDLSLRRFMVA

SEQ ID NO: 1334 - protein, 20 aa, Artificial Sequence
  Synthetic
NIIAEDLSLRRFMVALILDI

SEQ ID NO: 1335 - protein, 15 aa, Artificial Sequence
  Synthetic
NITLLNNCTRVEIAE

SEQ ID NO: 1336 - protein, 15 aa, Artificial Sequence
  Synthetic
NLALGVINTLEWIPR

SEQ ID NO: 1337 - protein, 18 aa, Artificial Sequence
  Synthetic
NLFQVVHWSYNRPAYSPG

SEQ ID NO: 1338 - protein, 15 aa, Artificial Sequence
  Synthetic
NLVILPGQDLQYVLA

SEQ ID NO: 1339 - protein, 15 aa, Artificial Sequence
  Synthetic
NLYQQMGKPAPYMVN

SEQ ID NO: 1340 - protein, 20 aa, Artificial Sequence
  Synthetic
NLYQQMGKPAPYMVNLENSI

SEQ ID NO: 1341 - protein, 15 aa, Artificial Sequence
  Synthetic
NNCTRVEIAEYRRLL

SEQ ID NO: 1342 - protein, 10 aa, Artificial Sequence
  Synthetic
NPDREYDFRD

SEQ ID NO: 1343 - protein, 9 aa, Artificial Sequence
  Synthetic
NPDVSGPKL

SEQ ID NO: 1344 - protein, 15 aa, Artificial Sequence
  Synthetic
NPDVSGPKLTGALIG

SEQ ID NO: 1345 - protein, 20 aa, Artificial Sequence
  Synthetic
NPDVSGPKLTGALIGILSLF

SEQ ID NO: 1346 - protein, 15 aa, Artificial Sequence
  Synthetic
NPPERIKLDYDQYCA

SEQ ID NO: 1347 - protein, 15 aa, Artificial Sequence
  Synthetic
NQAKWAVPTTRTDDK

SEQ ID NO: 1348 - protein, 15 aa, Artificial Sequence
  Synthetic
NQDPDKILTYIAADH

SEQ ID NO: 1349 - protein, 15 aa, Artificial Sequence
  Synthetic
NQLSCDLIGQKLGLK

SEQ ID NO: 1350 - protein, 27 aa, Artificial Sequence
  Synthetic
NQQSRWGLGSPNCHGPDWASPVCQRHS

SEQ ID NO: 1351 - protein, 12 aa, Artificial Sequence
  Synthetic
NSTLGVKSAREF

SEQ ID NO: 1352 - protein, 15 aa, Artificial Sequence
  Synthetic
NTPHGQLEVQVPPDP

SEQ ID NO: 1353 - protein, 15 aa, Artificial Sequence
  Synthetic
NVSAIFMAVLLTLQT

SEQ ID NO: 1354 - protein, 15 aa, Artificial Sequence
  Synthetic
PAEVDGDVKLSSNLV

SEQ ID NO: 1355 - protein, 15 aa, Artificial Sequence
  Synthetic
PAFGHSDAACWGFPT

SEQ ID NO: 1356 - protein, 15 aa, Artificial Sequence
  Synthetic
PALICCCRGRCNKKG

SEQ ID NO: 1357 - protein, 13 aa, Artificial Sequence
  Synthetic
PDKILTYIAADHC

SEQ ID NO: 1358 - protein, 15 aa, Artificial Sequence
  Synthetic
PERIKLDYDQYCADV

SEQ ID NO: 1359 - protein, 8 aa, Artificial Sequence
  Synthetic
PERPRLRL

SEQ ID NO: 1360 - protein, 15 aa, Artificial Sequence
  Synthetic
PGCATQAPVPVRLAG

SEQ ID NO: 1361 - protein, 29 aa, Artificial Sequence
  Synthetic
PGCATQAPVPVRLAGVRFESKIVDGGCFA

SEQ ID NO: 1362 - protein, 8 aa, Artificial Sequence
  Synthetic
PGEVWVTP

SEQ ID NO: 1363 - protein, 15 aa, Artificial Sequence
  Synthetic
PGEVWVTPVIGSQAR

SEQ ID NO: 1364 - protein, 16 aa, Artificial Sequence
  Synthetic
PGKLDVNKSKTHISVN

SEQ ID NO: 1365 - protein, 15 aa, Artificial Sequence
  Synthetic
PGLGAPVFHMTNYLE

SEQ ID NO: 1366 - protein, 8 aa, Artificial Sequence
  Synthetic
PGPGEVWV

SEQ ID NO: 1367 - protein, 15 aa, Artificial Sequence
  Synthetic
PHKTVRVKFHTETRT

SEQ ID NO: 1368 - protein, 15 aa, Artificial Sequence
  Synthetic
PIELQVECFTWDQKL

SEQ ID NO: 1369 - protein, 10 aa, Artificial Sequence
  Synthetic
PISLERLDVG

SEQ ID NO: 1370 - protein, 15 aa, Artificial Sequence
  Synthetic
PISLERLDVGTNLGN

SEQ ID NO: 1371 - protein, 15 aa, Artificial Sequence
  Synthetic
PKALFTQQGGAYGRC

SEQ ID NO: 1372 - protein, 15 aa, Artificial Sequence
  Synthetic
PKYVATQGYLISNFD

SEQ ID NO: 1373 - protein, 13 aa, Artificial Sequence
  Synthetic
PLDIDTASESSQD

SEQ ID NO: 1374 - protein, 15 aa, Artificial Sequence
  Synthetic
PLGLKFKTVRPVALP

SEQ ID NO: 1375 - protein, 15 aa, Artificial Sequence
  Synthetic
PLITHGSGMDLYKSN

SEQ ID NO: 1376 - protein, 15 aa, Artificial Sequence
  Synthetic
PLKDNRIPSYGVLSV

SEQ ID NO: 1377 - protein, 8 aa, Artificial Sequence
  Synthetic
PLLRTAPG

SEQ ID NO: 1378 - protein, 13 aa, Artificial Sequence
  Synthetic
PLLSCKPWQESRK

SEQ ID NO: 1379 - protein, 14 aa, Artificial Sequence
  Synthetic
PPATVYRYDSRPPE

SEQ ID NO: 1380 - protein, 12 aa, Artificial Sequence
  Synthetic
PPISLERLDVGT

SEQ ID NO: 1381 - protein, 20 aa, Artificial Sequence
  Synthetic
PPPPEERQETRSQTPAPKPS

SEQ ID NO: 1382 - protein, 15 aa, Artificial Sequence
  Synthetic
PQEQITQHGSPYGRC

SEQ ID NO: 1383 - protein, 18 aa, Artificial Sequence
  Synthetic
PQEQITQHGSPYGRCANK

SEQ ID NO: 1384 - protein, 25 aa, Artificial Sequence
  Synthetic
PQPGPQPPQPPQPQPEAPAPQPPAG

SEQ ID NO: 1385 - protein, 13 aa, Artificial Sequence
  Synthetic
PRLGGKEDRRVKQ

SEQ ID NO: 1386 - protein, 8 aa, Artificial Sequence
  Synthetic
PRLRLVDA

SEQ ID NO: 1387 - protein, 15 aa, Artificial Sequence
  Synthetic
PRNVRVTGCYQCGTP

SEQ ID NO: 1388 - protein, 13 aa, Artificial Sequence
  Synthetic
PSRASDARAAHLP

SEQ ID NO: 1389 - protein, 15 aa, Artificial Sequence
  Synthetic
PTGQIHWGNLSKIGV

SEQ ID NO: 1390 - protein, 13 aa, Artificial Sequence
  Synthetic
PTGTPLDIDTASE

SEQ ID NO: 1391 - protein, 15 aa, Artificial Sequence
  Synthetic
PTLSEIKGVIVHRLE

SEQ ID NO: 1392 - protein, 15 aa, Artificial Sequence
  Synthetic
PTTIRGQFSNMSLSL

SEQ ID NO: 1393 - protein, 10 aa, Artificial Sequence
  Synthetic
PTTRTDDKLR

SEQ ID NO: 1394 - protein, 21 aa, Artificial Sequence
  Synthetic
PTTRTDDKLRMETCFQQACKG

SEQ ID NO: 1395 - protein, 15 aa, Artificial Sequence
  Synthetic
PVALPRTLAPPRNVR

SEQ ID NO: 1396 - protein, 19 aa, Artificial Sequence
  Synthetic
PVFAGANYAAWAVNVAQVI

SEQ ID NO: 1397 - protein, 8 aa, Artificial Sequence
  Synthetic
PVIGSQAR

SEQ ID NO: 1398 - protein, 15 aa, Artificial Sequence
  Synthetic
PVVEVNGVTIQVGSR

SEQ ID NO: 1399 - protein, 20 aa, Artificial Sequence
  Synthetic
PWELVVLTARPEDGWTCRGV

SEQ ID NO: 1400 - protein, 13 aa, Artificial Sequence
  Synthetic
PWQESRKNKAQTR

SEQ ID NO: 1401 - protein, 15 aa, Artificial Sequence
  Synthetic
PYMVNLENSIQNKFS

SEQ ID NO: 1402 - protein, 20 aa, Artificial Sequence
  Synthetic
PYMVNLENSIQNKFSAGSYP

SEQ ID NO: 1403 - protein, 10 aa, Artificial Sequence
  Synthetic
PYQGSGKGVS

SEQ ID NO: 1404 - protein, 15 aa, Artificial Sequence
  Synthetic
PYQVSCGGESDRASA

SEQ ID NO: 1405 - protein, 13 aa, Artificial Sequence
  Synthetic
QACKGKIQALCEN

SEQ ID NO: 1406 - protein, 15 aa, Artificial Sequence
  Synthetic
QAGQEMILAVQGVQD

SEQ ID NO: 1407 - protein, 15 aa, Artificial Sequence
  Synthetic
QALCENPECVPLKDN

SEQ ID NO: 1408 - protein, 7 aa, Artificial Sequence
  Synthetic
QALGALK

SEQ ID NO: 1409 - protein, 15 aa, Artificial Sequence
  Synthetic
QAPVPVRLAGVRFES

SEQ ID NO: 1410 - protein, 15 aa, Artificial Sequence
  Synthetic
QCGTPALVEGLAPGG

SEQ ID NO: 1411 - protein, 15 aa, Artificial Sequence
  Synthetic
QDPDKILTYIAADHC

SEQ ID NO: 1412 - protein, 15 aa, Artificial Sequence
  Synthetic
QECLRGSTKSCARTL

SEQ ID NO: 1413 - protein, 14 aa, Artificial Sequence
  Synthetic
QEQITQHGSPYGRC

SEQ ID NO: 1414 - protein, 13 aa, Artificial Sequence
  Synthetic
QESRKNKAQTRTP

SEQ ID NO: 1415 - protein, 15 aa, Artificial Sequence
  Synthetic
QGDQSENELPRLGGK

SEQ ID NO: 1416 - protein, 20 aa, Artificial Sequence
  Synthetic
QGDQSENELPRLGGKEDRRV

SEQ ID NO: 1417 - protein, 20 aa, Artificial Sequence
  Synthetic
QGESGHDIKITAENTPLPIA

SEQ ID NO: 1418 - protein, 15 aa, Artificial Sequence
  Synthetic
QGSGKGVSFQLVKLG

SEQ ID NO: 1419 - protein, 15 aa, Artificial Sequence
  Synthetic
QGVQDYINNELIPSM

SEQ ID NO: 1420 - protein, 15 aa, Artificial Sequence
  Synthetic
QLEVQVPPDPGDLVE

SEQ ID NO: 1421 - protein, 9 aa, Artificial Sequence
  Synthetic
QLPEATFMV

SEQ ID NO: 1422 - protein, 25 aa, Artificial Sequence
  Synthetic
QLPFLGHDGHHGGTLRVGQHYRNAS

SEQ ID NO: 1423 - protein, 10 aa, Artificial Sequence
  Synthetic
QLSMYRVFEV

SEQ ID NO: 1424 - protein, 6 aa, Artificial Sequence
  Synthetic
QLSNIT

SEQ ID NO: 1425 - protein, 15 aa, Artificial Sequence
  Synthetic
QNIRPVQSVASSRRH

SEQ ID NO: 1426 - protein, 15 aa, Artificial Sequence
  Synthetic
QNKFSAGSYPLLWSY

SEQ ID NO: 1427 - protein, 20 aa, Artificial Sequence
  Synthetic
QNKFSAGSYPLLWSYAMGVG

SEQ ID NO: 1428 - protein, 25 aa, Artificial Sequence
  Synthetic
QNKFSAGSYPLLWSYAMGVGVELEN

SEQ ID NO: 1429 - protein, 15 aa, Artificial Sequence
  Synthetic
QQACKGKIQALCENP

SEQ ID NO: 1430 - protein, 15 aa, Artificial Sequence
  Synthetic
QQRRVVGEFRLERKW

SEQ ID NO: 1431 - protein, 20 aa, Artificial Sequence
  Synthetic
QQRRVVGEFRLERKWLDVVR

SEQ ID NO: 1432 - protein, 18 aa, Artificial Sequence
  Synthetic
QQTRANPNPYTSRRSVAS

SEQ ID NO: 1433 - protein, 15 aa, Artificial Sequence
  Synthetic
QRHSPDCSRLVGATP

SEQ ID NO: 1434 - protein, 15 aa, Artificial Sequence
  Synthetic
QSGLTFASRGTNMED

SEQ ID NO: 1435 - protein, 20 aa, Artificial Sequence
  Synthetic
QSGLTFASRGTNMEDEADQY

SEQ ID NO: 1436 - protein, 20 aa, Artificial Sequence
  Synthetic
QSIALSSLMVAQAIPLVGEL

SEQ ID NO: 1437 - protein, 15 aa, Artificial Sequence
  Synthetic
QSRFGWFENKEISDI

SEQ ID NO: 1438 - protein, 20 aa, Artificial Sequence
  Synthetic
QSRFGWFENKEISDIEVQDP

SEQ ID NO: 1439 - protein, 7 aa, Artificial Sequence
  Synthetic
QSRGEAR

SEQ ID NO: 1440 - protein, 18 aa, Artificial Sequence
  Synthetic
QSRGEARESYRETGPSRA

SEQ ID NO: 1441 - protein, 18 aa, Artificial Sequence
  Synthetic
QTGRGGSAPRPELGPPTN

SEQ ID NO: 1442 - protein, 25 aa, Artificial Sequence
  Synthetic
QTPAPKPSRAPPQQPQPPRMQTGRG

SEQ ID NO: 1443 - protein, 15 aa, Artificial Sequence
  Synthetic
QVGSRRYPDAVYLHR

SEQ ID NO: 1444 - protein, 13 aa, Artificial Sequence
  Synthetic
QVSFLQGDQSENE

SEQ ID NO: 1445 - protein, 15 aa, Artificial Sequence
  Synthetic
QYHPTACEVEPAFGH

SEQ ID NO: 1446 - protein, 15 aa, Artificial Sequence
  Synthetic
QYVLATYDTSRVEHA

SEQ ID NO: 1447 - protein, 13 aa, Artificial Sequence
  Synthetic
RANPNPYTSRRSV

SEQ ID NO: 1448 - protein, 13 aa, Artificial Sequence
  Synthetic
RASDARAAHLPTG

SEQ ID NO: 1449 - protein, 15 aa, Artificial Sequence
  Synthetic
RASLETTNQAIEAIR

SEQ ID NO: 1450 - protein, 20 aa, Artificial Sequence
  Synthetic
RCGRLICGLSTTAQYPPTRF

SEQ ID NO: 1451 - protein, 19 aa, Artificial Sequence
  Synthetic
RDGQSVIGACASPYEGRYR

SEQ ID NO: 1452 - protein, 13 aa, Artificial Sequence
  Synthetic
RESYRETGPSRAS

SEQ ID NO: 1453 - protein, 13 aa, Artificial Sequence
  Synthetic
RETGPSRASDARA

SEQ ID NO: 1454 - protein, 14 aa, Artificial Sequence
  Synthetic
RFAKYQQQGRLEAR

SEQ ID NO: 1455 - protein, 24 aa, Artificial Sequence
  Synthetic
RFGAPQAFLAGLLLATVAVGTARA

SEQ ID NO: 1456 - protein, 15 aa, Artificial Sequence
  Synthetic
RFMVALILDIKRTPG

SEQ ID NO: 1457 - protein, 20 aa, Artificial Sequence
  Synthetic
RFMVALILDIKRTPGNKPRI

SEQ ID NO: 1458 - protein, 13 aa, Artificial Sequence
  Synthetic
RGEARESYRETGP

SEQ ID NO: 1459 - protein, 9 aa, Artificial Sequence
  Synthetic
RGTTPPAYG

SEQ ID NO: 1460 - protein, 9 aa, Artificial Sequence
  Synthetic
RIETRSARH

SEQ ID NO: 1461 - protein, 11 aa, Artificial Sequence
  Synthetic
RILAGALATYQ

SEQ ID NO: 1462 - protein, 11 aa, Artificial Sequence
  Synthetic
RIPPENIRRVT

SEQ ID NO: 1463 - protein, 7 aa, Artificial Sequence
  Synthetic
RISNLND

SEQ ID NO: 1464 - protein, 7 aa, Artificial Sequence
  Synthetic
RLANLNG

SEQ ID NO: 1465 - protein, 15 aa, Artificial Sequence
  Synthetic
RLDVGTNLGNAIAKL

SEQ ID NO: 1466 - protein, 9 aa, Artificial Sequence
  Synthetic
RLERKWLDV

SEQ ID NO: 1467 - protein, 15 aa, Artificial Sequence
  Synthetic
RLGGKEDRRVKQSRG

SEQ ID NO: 1468 - protein, 20 aa, Artificial Sequence
  Synthetic
RLGGKEDRRVKQSRGEARES

SEQ ID NO: 1469 - protein, 9 aa, Artificial Sequence
  Synthetic
RLLDRLVRL

SEQ ID NO: 1470 - protein, 8 aa, Artificial Sequence
  Synthetic
RLRLVDAD

SEQ ID NO: 1471 - protein, 13 aa, Artificial Sequence
  Synthetic
RLRLVDADDPLLR

SEQ ID NO: 1472 - protein, 31 aa, Artificial Sequence
  Synthetic
RLRLVDADDPLLRTAPGPGEVWVTPVIGSQA

SEQ ID NO: 1473 - protein, 32 aa, Artificial Sequence
  Synthetic
RLRLVQDADDPLLRIAPGPGEVWVTPVIGSQA

SEQ ID NO: 1474 - protein, 10 aa, Artificial Sequence
  Synthetic
RLSDNGYYTV

SEQ ID NO: 1475 - protein, 8 aa, Artificial Sequence
  Synthetic
RLVDADDP

SEQ ID NO: 1476 - protein, 15 aa, Artificial Sequence
  Synthetic
RLVDADDPLLRTAPG

SEQ ID NO: 1477 - protein, 8 aa, Artificial Sequence
  Synthetic
RLVGATPE

SEQ ID NO: 1478 - protein, 27 aa, Artificial Sequence
  Synthetic
RMQTGRGGSAPRPELGPPTNPFQAAVA

SEQ ID NO: 1479 - protein, 9 aa, Artificial Sequence
  Synthetic
RMSKGVFKV

SEQ ID NO: 1480 - protein, 15 aa, Artificial Sequence
  Synthetic
RNPGLGAPVFHMTNY

SEQ ID NO: 1481 - protein, 8 aa, Artificial Sequence
  Synthetic
RPRLRLVD

SEQ ID NO: 1482 - protein, 19 aa, Artificial Sequence
  Synthetic
RQAESSEAMAAWSERAGEA

SEQ ID NO: 1483 - protein, 15 aa, Artificial Sequence
  Synthetic
RQTWAEWAAAHWWQL

SEQ ID NO: 1484 - protein, 13 aa, Artificial Sequence
  Synthetic
RRVKQSRGEARES

SEQ ID NO: 1485 - protein, 9 aa, Artificial Sequence
  Synthetic
RRYPDAVYL

SEQ ID NO: 1486 - protein, 15 aa, Artificial Sequence
  Synthetic
RRYPDAVYLHRIDLG

SEQ ID NO: 1487 - protein, 15 aa, Artificial Sequence
  Synthetic
RSAGKVSSTLASELG

SEQ ID NO: 1488 - protein, 20 aa, Artificial Sequence
  Synthetic
RSAGKVSSTLASELGITAED

SEQ ID NO: 1489 - protein, 8 aa, Artificial Sequence
  Synthetic
RSELSQLS

SEQ ID NO: 1490 - protein, 15 aa, Artificial Sequence
  Synthetic
RSELSQLSMYRVFEV

SEQ ID NO: 1491 - protein, 24 aa, Artificial Sequence
  Synthetic
RSQTPAPKPSRAPPQQPQPPRMQT

SEQ ID NO: 1492 - protein, 8 aa, Artificial Sequence
  Synthetic
RTAPGPGE

SEQ ID NO: 1493 - protein, 15 aa, Artificial Sequence
  Synthetic
RTAPGPGEVWVTPVI

SEQ ID NO: 1494 - protein, 15 aa, Artificial Sequence
  Synthetic
RTDDKLRMETCFQQA

SEQ ID NO: 1495 - protein, 15 aa, Artificial Sequence
  Synthetic
RTLAPPRNVRVTGCY

SEQ ID NO: 1496 - protein, 15 aa, Artificial Sequence
  Synthetic
RTVLEPIRDALNAMT

SEQ ID NO: 1497 - protein, 15 aa, Artificial Sequence
  Synthetic
RVEHAVVYYVYSPSR

SEQ ID NO: 1498 - protein, 15 aa, Artificial Sequence
  Synthetic
RVFEVGVIRNPGLGA

SEQ ID NO: 1499 - protein, 19 aa, Artificial Sequence
  Synthetic
RVHVSKEEQYYDYEDATFE

SEQ ID NO: 1500 - protein, 8 aa, Artificial Sequence
  Synthetic
RVIDPAAQ

SEQ ID NO: 1501 - protein, 15 aa, Artificial Sequence
  Synthetic
RVKFHTETRTVWQLS

SEQ ID NO: 1502 - protein, 11 aa, Artificial Sequence
  Synthetic
RVYHNGITGET

SEQ ID NO: 1503 - protein, 11 aa, Artificial Sequence
  Synthetic
RYDSRPPEDVF

SEQ ID NO: 1504 - protein, 15 aa, Artificial Sequence
  Synthetic
RYPDAVYLHRIDLGP

SEQ ID NO: 1505 - protein, 15 aa, Artificial Sequence
  Synthetic
SAEISIQALSYALGG

SEQ ID NO: 1506 - protein, 15 aa, Artificial Sequence
  Synthetic
SAEPLLSCKPWQESR

SEQ ID NO: 1507 - protein, 20 aa, Artificial Sequence
  Synthetic
SAEPLLSCKPWQESRKNKAQ

SEQ ID NO: 1508 - protein, 14 aa, Artificial Sequence
  Synthetic
SAGKVSSTLASELG

SEQ ID NO: 1509 - protein, 24 aa, Artificial Sequence
  Synthetic
SAGKVSSTLASELGITAEDARLVS

SEQ ID NO: 1510 - protein, 10 aa, Artificial Sequence
  Synthetic
SCTVTREDGT

SEQ ID NO: 1511 - protein, 15 aa, Artificial Sequence
  Synthetic
SDAACWGFPTDTVMS

SEQ ID NO: 1512 - protein, 13 aa, Artificial Sequence
  Synthetic
SDARAAHLPTGTP

SEQ ID NO: 1513 - protein, 23 aa, Artificial Sequence
  Synthetic
SDWHQGTHVCHTKHMDFWCVEHD

SEQ ID NO: 1514 - protein, 15 aa, Artificial Sequence
  Synthetic
SELRRWIKYTQQRRV

SEQ ID NO: 1515 - protein, 20 aa, Artificial Sequence
  Synthetic
SELRRWIKYTQQRRVVGEFR

SEQ ID NO: 1516 - protein, 6 aa, Artificial Sequence
  Synthetic
SELSQL

SEQ ID NO: 1517 - protein, 7 aa, Artificial Sequence
  Synthetic
SELSQLS

SEQ ID NO: 1518 - protein, 20 aa, Artificial Sequence
  Synthetic
SEYLAHRRIPPENIRRVTRV

SEQ ID NO: 1519 - protein, 13 aa, Artificial Sequence
  Synthetic
SFLQGDQSENELP

SEQ ID NO: 1520 - protein, 15 aa, Artificial Sequence
  Synthetic
SGKGVSFQLVKLGVW

SEQ ID NO: 1521 - protein, 15 aa, Artificial Sequence
  Synthetic
SHRGVIADNQAKWAV

SEQ ID NO: 1522 - protein, 15 aa, Artificial Sequence
  Synthetic
SIEHQVKDVLTPLFK

SEQ ID NO: 1523 - protein, 15 aa, Artificial Sequence
  Synthetic
SKIGVVGIGSASYKV

SEQ ID NO: 1524 - protein, 15 aa, Artificial Sequence
  Synthetic
SKRSELSQLSMYRVF

SEQ ID NO: 1525 - protein, 21 aa, Artificial Sequence
  Synthetic
SLFVESPGQLIQRITDDPDVS

SEQ ID NO: 1526 - protein, 15 aa, Artificial Sequence
  Synthetic
SLSTNLDVTNSIEHQ

SEQ ID NO: 1527 - protein, 25 aa, Artificial Sequence
  Synthetic
SLSTNLDVTNSIEHQVKDVLTPLFK

SEQ ID NO: 1528 - protein, 10 aa, Artificial Sequence
  Synthetic
SLWGSGLLML

SEQ ID NO: 1529 - protein, 15 aa, Artificial Sequence
  Synthetic
SMKGLSSTSIVYILI

SEQ ID NO: 1530 - protein, 10 aa, Artificial Sequence
  Synthetic
SMYRVFEVGV

SEQ ID NO: 1531 - protein, 15 aa, Artificial Sequence
  Synthetic
SNDLSNCMVALGELK

SEQ ID NO: 1532 - protein, 8 aa, Artificial Sequence
  Synthetic
SPGQLIQR

SEQ ID NO: 1533 - protein, 13 aa, Artificial Sequence
  Synthetic
SQDPQDSRRSAEP

SEQ ID NO: 1534 - protein, 15 aa, Artificial Sequence
  Synthetic
SRIVINREHLMIDRP

SEQ ID NO: 1535 - protein, 13 aa, Artificial Sequence
  Synthetic
SRKNKAQTRTPLQ

SEQ ID NO: 1536 - protein, 8 aa, Artificial Sequence
  Synthetic
SRLVGATP

SEQ ID NO: 1537 - protein, 24 aa, Artificial Sequence
  Synthetic
SRLVGATPERPRLRLVDADDPLLR

SEQ ID NO: 1538 - protein, 15 aa, Artificial Sequence
  Synthetic
SRPGLKPDLTGTSKS

SEQ ID NO: 1539 - protein, 15 aa, Artificial Sequence
  Synthetic
SRRSVASIVGTLVRM

SEQ ID NO: 1540 - protein, 15 aa, Artificial Sequence
  Synthetic
SRWGLGSPNCHGPDW

SEQ ID NO: 1541 - protein, 5 aa, Artificial Sequence
  Synthetic
SSATK

SEQ ID NO: 1542 - protein, 15 aa, Artificial Sequence
  Synthetic
SSGGYAQLASYFNPG

SEQ ID NO: 1543 - protein, 7 aa, Artificial Sequence
  Synthetic
SSLGNGV

SEQ ID NO: 1544 - protein, 15 aa, Artificial Sequence
  Synthetic
SSNLVILPGQDLQYV

SEQ ID NO: 1545 - protein, 15 aa, Artificial Sequence
  Synthetic
SSQDPQDSRRSAEPL

SEQ ID NO: 1546 - protein, 20 aa, Artificial Sequence
  Synthetic
SSQDPQDSRRSAEPLLSCKP

SEQ ID NO: 1547 - protein, 15 aa, Artificial Sequence
  Synthetic
SSRRHKRFAGVVLAG

SEQ ID NO: 1548 - protein, 15 aa, Artificial Sequence
  Synthetic
SSTSIVYILIAVCLG

SEQ ID NO: 1549 - protein, 7 aa, Artificial Sequence
  Synthetic
STPGIVI

SEQ ID NO: 1550 - protein, 23 aa, Artificial Sequence
  Synthetic
STPGIVIPPQEQITQHGSPYGRC

SEQ ID NO: 1551 - protein, 12 aa, Artificial Sequence
  Synthetic
STSSSRRYTEVY

SEQ ID NO: 1552 - protein, 15 aa, Artificial Sequence
  Synthetic
SYFIVLSIAYPTLSE

SEQ ID NO: 1553 - protein, 13 aa, Artificial Sequence
  Synthetic
SYRETGPSRASDA

SEQ ID NO: 1554 - protein, 4 aa, Artificial Sequence
  Synthetic
SYVK

SEQ ID NO: 1555 - protein, 15 aa, Artificial Sequence
  Synthetic
SYVQHPHKTVRVKFH

SEQ ID NO: 1556 - protein, 8 aa, Artificial Sequence
  Synthetic
TAPGPGEV

SEQ ID NO: 1557 - protein, 14 aa, Artificial Sequence
  Synthetic
TATRLLSSTNSRLC

SEQ ID NO: 1558 - protein, 15 aa, Artificial Sequence
  Synthetic
TDDPVIDRLYLSSHR

SEQ ID NO: 1559 - protein, 15 aa, Artificial Sequence
  Synthetic
TEILSLFGPSLRDPI

SEQ ID NO: 1560 - protein, 15 aa, Artificial Sequence
  Synthetic
TETRTVWQLSVAGVS

SEQ ID NO: 1561 - protein, 14 aa, Artificial Sequence
  Synthetic
TEVYLEHRMQEAVE

SEQ ID NO: 1562 - protein, 15 aa, Artificial Sequence
  Synthetic
TFMPEGTVCSQNALY

SEQ ID NO: 1563 - protein, 15 aa, Artificial Sequence
  Synthetic
TGACICEIPTDVSCE

SEQ ID NO: 1564 - protein, 7 aa, Artificial Sequence
  Synthetic
TGDLRAY

SEQ ID NO: 1565 - protein, 15 aa, Artificial Sequence
  Synthetic
TGMQSWVPLSTDDPV

SEQ ID NO: 1566 - protein, 15 aa, Artificial Sequence
  Synthetic
TGNQQSRWGLGSPNC

SEQ ID NO: 1567 - protein, 13 aa, Artificial Sequence
  Synthetic
TGPSRASDARAAH

SEQ ID NO: 1568 - protein, 15 aa, Artificial Sequence
  Synthetic
TGTIINQDPDKILTY

SEQ ID NO: 1569 - protein, 15 aa, Artificial Sequence
  Synthetic
TGVVYGTHTTAVSET

SEQ ID NO: 1570 - protein, 15 aa, Artificial Sequence
  Synthetic
TIRGQFSNMSLSLLD

SEQ ID NO: 1571 - protein, 15 aa, Artificial Sequence
  Synthetic
TLGATCALPLAGLLA

SEQ ID NO: 1572 - protein, 9 aa, Artificial Sequence
  Synthetic
TLLNNCTRV

SEQ ID NO: 1573 - protein, 12 aa, Artificial Sequence
  Synthetic
TLNVPPPPDPGR

SEQ ID NO: 1574 - protein, 22 aa, Artificial Sequence
  Synthetic
TLNVPPPPDPGRASTSGTPIKK

SEQ ID NO: 1575 - protein, 15 aa, Artificial Sequence
  Synthetic
TMTSQGMYGGTYPVE

SEQ ID NO: 1576 - protein, 15 aa, Artificial Sequence
  Synthetic
TNLGNAIAKLEDAKE

SEQ ID NO: 1577 - protein, 15 aa, Artificial Sequence
  Synthetic
TNMEDEADQYFSHDD

SEQ ID NO: 1578 - protein, 20 aa, Artificial Sequence
  Synthetic
TNMEDEADQYFSHDDPISSD

SEQ ID NO: 1579 - protein, 15 aa, Artificial Sequence
  Synthetic
TNPFQAAVARGLRPP

SEQ ID NO: 1580 - protein, 15 aa, Artificial Sequence
  Synthetic
TNSIEHQVKDVLTPL

SEQ ID NO: 1581 - protein, 15 aa, Artificial Sequence
  Synthetic
TNYLEQPVSNDLSNC

SEQ ID NO: 1582 - protein, 27 aa, Artificial Sequence
  Synthetic
TNYLEQPVSNDLSNCMVALGELKLAAL

SEQ ID NO: 1583 - protein, 8 aa, Artificial Sequence
  Synthetic
TPERPRLR

SEQ ID NO: 1584 - protein, 20 aa, Artificial Sequence
  Synthetic
TPERPRLRLVDADDPLLRTA

SEQ ID NO: 1585 - protein, 9 aa, Artificial Sequence
  Synthetic
TPGNKPRIA

SEQ ID NO: 1586 - protein, 15 aa, Artificial Sequence
  Synthetic
TPLDIDTASESSQDP

SEQ ID NO: 1587 - protein, 20 aa, Artificial Sequence
  Synthetic
TPLDIDTASESSQDPQDSRR

SEQ ID NO: 1588 - protein, 15 aa, Artificial Sequence
  Synthetic
TPLFKIIGDEVGLRT

SEQ ID NO: 1589 - protein, 7 aa, Artificial Sequence
  Synthetic
TPLQCTM

SEQ ID NO: 1590 - protein, 8 aa, Artificial Sequence
  Synthetic
TPVIGSQA

SEQ ID NO: 1591 - protein, 10 aa, Artificial Sequence
  Synthetic
TPVIGSQARK

SEQ ID NO: 1592 - protein, 15 aa, Artificial Sequence
  Synthetic
TQGYLISNFDESSCT

SEQ ID NO: 1593 - protein, 24 aa, Artificial Sequence
  Synthetic
TRANPNPYTSRRSVASIVGTLVRM

SEQ ID NO: 1594 - protein, 13 aa, Artificial Sequence
  Synthetic
TRFGCAMRWGLPP

SEQ ID NO: 1595 - protein, 16 aa, Artificial Sequence
  Synthetic
TRNTGQPATDHYYSNV

SEQ ID NO: 1596 - protein, 13 aa, Artificial Sequence
  Synthetic
TRTPLQCTMTEIF

SEQ ID NO: 1597 - protein, 12 aa, Artificial Sequence
  Synthetic
TRWHRLLRMPVR

SEQ ID NO: 1598 - protein, 15 aa, Artificial Sequence
  Synthetic
TSGSGGAIRGIKHII

SEQ ID NO: 1599 - protein, 20 aa, Artificial Sequence
  Synthetic
TSGSGGAIRGIKHIIIVPIP

SEQ ID NO: 1600 - protein, 15 aa, Artificial Sequence
  Synthetic
TSQGMYGGTYLVEKP

SEQ ID NO: 1601 - protein, 15 aa, Artificial Sequence
  Synthetic
TSRVEHAVVYYVYSP

SEQ ID NO: 1602 - protein, 12 aa, Artificial Sequence
  Synthetic
TSSSRRYTEVYL

SEQ ID NO: 1603 - protein, 5 aa, Artificial Sequence
  Synthetic
TSYVG

SEQ ID NO: 1604 - protein, 15 aa, Artificial Sequence
  Synthetic
TTEDKISRAVGPRQA

SEQ ID NO: 1605 - protein, 20 aa, Artificial Sequence
  Synthetic
TTEDKISRAVGPRQAQVSFL

SEQ ID NO: 1606 - protein, 13 aa, Artificial Sequence
  Synthetic
TTERIETRSARHP

SEQ ID NO: 1607 - protein, 15 aa, Artificial Sequence
  Synthetic
TTNQAIEAIRQAGQE

SEQ ID NO: 1608 - protein, 15 aa, Artificial Sequence
  Synthetic
TTSDPWHPPGPLGLK

SEQ ID NO: 1609 - protein, 15 aa, Artificial Sequence
  Synthetic
TVCSQNALYPMSPLL

SEQ ID NO: 1610 - protein, 15 aa, Artificial Sequence
  Synthetic
TVNGEDVGAVPPGKF

SEQ ID NO: 1611 - protein, 15 aa, Artificial Sequence
  Synthetic
TYPVEKPNLSSKRSE

SEQ ID NO: 1612 - protein, 15 aa, Artificial Sequence
  Synthetic
VAGVSCNVTTEHPFC

SEQ ID NO: 1613 - protein, 23 aa, Artificial Sequence
  Synthetic
VAPGIVIPPKALFTQQGGAYGRC

SEQ ID NO: 1614 - protein, 25 aa, Artificial Sequence
  Synthetic
VCHTKHMDFWCVEHDRPPPATPTPL

SEQ ID NO: 1615 - protein, 19 aa, Artificial Sequence
  Synthetic
VCQRHSPDCSRLVGATPER

SEQ ID NO: 1616 - protein, 8 aa, Artificial Sequence
  Synthetic
VDADDPLL

SEQ ID NO: 1617 - protein, 20 aa, Artificial Sequence
  Synthetic
VDADDPLLRTAPGPGEVWVT

SEQ ID NO: 1618 - protein, 20 aa, Artificial Sequence
  Synthetic
VDIGFAAYNFVESIINLFQV

SEQ ID NO: 1619 - protein, 15 aa, Artificial Sequence
  Synthetic
VEIAEYRRLLRTVLE

SEQ ID NO: 1620 - protein, 15 aa, Artificial Sequence
  Synthetic
VELENSMGGLNFGRS

SEQ ID NO: 1621 - protein, 20 aa, Artificial Sequence
  Synthetic
VELENSMGGLNFGRSYFDPA

SEQ ID NO: 1622 - protein, 15 aa, Artificial Sequence
  Synthetic
VELKIKIASGFGPLI

SEQ ID NO: 1623 - protein, 14 aa, Artificial Sequence
  Synthetic
VEMDEWIHAHTTSD

SEQ ID NO: 1624 - protein, 15 aa, Artificial Sequence
  Synthetic
VEMPEWIHAHTTSDP

SEQ ID NO: 1625 - protein, 9 aa, Artificial Sequence
  Synthetic
VERRLVKVL

SEQ ID NO: 1626 - protein, 8 aa, Artificial Sequence
  Synthetic
VESPGQLI

SEQ ID NO: 1627 - protein, 15 aa, Artificial Sequence
  Synthetic
VESPGQLIQRITDDP

SEQ ID NO: 1628 - protein, 20 aa, Artificial Sequence
  Synthetic
VESPGQLIQRITDDPDVSIR

SEQ ID NO: 1629 - protein, 15 aa, Artificial Sequence
  Synthetic
VFALASYVQHPHKTV

SEQ ID NO: 1630 - protein, 8 aa, Artificial Sequence
  Synthetic
VGATPERP

SEQ ID NO: 1631 - protein, 10 aa, Artificial Sequence
  Synthetic
VGATPERPRL

SEQ ID NO: 1632 - protein, 15 aa, Artificial Sequence
  Synthetic
VGATPERPRLRLVDA

SEQ ID NO: 1633 - protein, 15 aa, Artificial Sequence
  Synthetic
VGIGSASYKVMTRSS

SEQ ID NO: 1634 - protein, 15 aa, Artificial Sequence
  Synthetic
VGLRTPQRFTDLVKF

SEQ ID NO: 1635 - protein, 20 aa, Artificial Sequence
  Synthetic
VHHNTEEIVAQSIALSSLMV

SEQ ID NO: 1636 - protein, 15 aa, Artificial Sequence
  Synthetic
VHRLEGVSYNIGSQE

SEQ ID NO: 1637 - protein, 8 aa, Artificial Sequence
  Synthetic
VIGSQARK

SEQ ID NO: 1638 - protein, 6 aa, Artificial Sequence
  Synthetic
VITGSI

SEQ ID NO: 1639 - protein, 6 aa, Artificial Sequence
  Synthetic
VITGTI

SEQ ID NO: 1640 - protein, 8 aa, Artificial Sequence
  Synthetic
VKQSRGEA

SEQ ID NO: 1641 - protein, 10 aa, Artificial Sequence
  Synthetic
VLFVMFLSLI

SEQ ID NO: 1642 - protein, 15 aa, Artificial Sequence
  Synthetic
VLFVMFLSLIGLLAI

SEQ ID NO: 1643 - protein, 15 aa, Artificial Sequence
  Synthetic
VLTPLFKIIGDEVGL

SEQ ID NO: 1644 - protein, 15 aa, Artificial Sequence
  Synthetic
VMTRSSHQSLVIKLM

SEQ ID NO: 1645 - protein, 15 aa, Artificial Sequence
  Synthetic
VPAAPCARIWNGTQR

SEQ ID NO: 1646 - protein, 15 aa, Artificial Sequence
  Synthetic
VPPDPGDLVEYIMNY

SEQ ID NO: 1647 - protein, 15 aa, Artificial Sequence
  Synthetic
VQSVASSRRHKRFAG

SEQ ID NO: 1648 - protein, 17 aa, Artificial Sequence
  Synthetic
VQTGGTSRTVTMRYLAS

SEQ ID NO: 1649 - protein, 5 aa, Artificial Sequence
  Synthetic
VQVRI

SEQ ID NO: 1650 - protein, 11 aa, Artificial Sequence
  Synthetic
VRAYNQPAGDV

SEQ ID NO: 1651 - protein, 15 aa, Artificial Sequence
  Synthetic
VRFESKIVDGGCFAP

SEQ ID NO: 1652 - protein, 15 aa, Artificial Sequence
  Synthetic
VRLAGVRFESKIVDG

SEQ ID NO: 1653 - protein, 15 aa, Artificial Sequence
  Synthetic
VSGSFGNRFILSQGN

SEQ ID NO: 1654 - protein, 14 aa, Artificial Sequence
  Synthetic
VSKEEQYYDYEDAT

SEQ ID NO: 1655 - protein, 15 aa, Artificial Sequence
  Synthetic
VSKGNCSGPTTIRGQ

SEQ ID NO: 1656 - protein, 15 aa, Artificial Sequence
  Synthetic
VTAALLNTPPPYQVS

SEQ ID NO: 1657 - protein, 15 aa, Artificial Sequence
  Synthetic
VTGCYQCGTPALVEG

SEQ ID NO: 1658 - protein, 8 aa, Artificial Sequence
  Synthetic
VTPVIGSQ

SEQ ID NO: 1659 - protein, 22 aa, Artificial Sequence
  Synthetic
VTTEHPFCNTPHGQLEVQVPPD

SEQ ID NO: 1660 - protein, 15 aa, Artificial Sequence
  Synthetic
VVLAGAALGVATAAQ

SEQ ID NO: 1661 - protein, 15 aa, Artificial Sequence
  Synthetic
VWQLSVAGVSCNVTT

SEQ ID NO: 1662 - protein, 8 aa, Artificial Sequence
  Synthetic
VWVTPVIG

SEQ ID NO: 1663 - protein, 12 aa, Artificial Sequence
  Synthetic
VWVTPVIGSQAR

SEQ ID NO: 1664 - protein, 15 aa, Artificial Sequence
  Synthetic
VYILIAVCLGGLIGI

SEQ ID NO: 1665 - protein, 15 aa, Artificial Sequence
  Synthetic
VYLHRIDLGPPISLE

SEQ ID NO: 1666 - protein, 8 aa, Artificial Sequence
  Synthetic
VYRYDSRP

SEQ ID NO: 1667 - protein, 12 aa, Artificial Sequence
  Synthetic
VYRYDSRPPEDV

SEQ ID NO: 1668 - protein, 15 aa, Artificial Sequence
  Synthetic
VYWLTIPPMKNLALG

SEQ ID NO: 1669 - protein, 15 aa, Artificial Sequence
  Synthetic
WDLEATGACICEIPT

SEQ ID NO: 1670 - protein, 15 aa, Artificial Sequence
  Synthetic
WDQKLWCRHFCVLAD

SEQ ID NO: 1671 - protein, 15 aa, Artificial Sequence
  Synthetic
WGFPTDTVMSVFALA

SEQ ID NO: 1672 - protein, 15 aa, Artificial Sequence
  Synthetic
WHPPGPLGLKFKTVR

SEQ ID NO: 1673 - protein, 15 aa, Artificial Sequence
  Synthetic
WIHAHTTSDPWHPPG

SEQ ID NO: 1674 - protein, 15 aa, Artificial Sequence
  Synthetic
WLTIPPMKNLALGVI

SEQ ID NO: 1675 - protein, 20 aa, Artificial Sequence
  Synthetic
WQESRKNKAQTRTPLQCTMT

SEQ ID NO: 1676 - protein, 13 aa, Artificial Sequence
  Synthetic
WVCIFMVCRRACR

SEQ ID NO: 1677 - protein, 8 aa, Artificial Sequence
  Synthetic
WVTPVIGS

SEQ ID NO: 1678 - protein, 15 aa, Artificial Sequence
  Synthetic
WYTTVPKYVATQGYL

SEQ ID NO: 1679 - protein, 15 aa, Artificial Sequence
  Synthetic
YALGGDINKVLEKLG

SEQ ID NO: 1680 - protein, 10 aa, Artificial Sequence
  Synthetic
YAMGVGVELE

SEQ ID NO: 1681 - protein, 11 aa, Artificial Sequence
  Synthetic
YAMGVGVELEN

SEQ ID NO: 1682 - protein, 15 aa, Artificial Sequence
  Synthetic
YCADVAAEELMNALV

SEQ ID NO: 1683 - protein, 15 aa, Artificial Sequence
  Synthetic
YDFRDLTWCINPPER

SEQ ID NO: 1684 - protein, 7 aa, Artificial Sequence
  Synthetic
YFEPGPT

SEQ ID NO: 1685 - protein, 15 aa, Artificial Sequence
  Synthetic
YFNPGGSYYKQYHPT

SEQ ID NO: 1686 - protein, 15 aa, Artificial Sequence
  Synthetic
YFRLGQEMVRRSAGK

SEQ ID NO: 1687 - protein, 20 aa, Artificial Sequence
  Synthetic
YFRLGQEMVRRSAGKVSSTL

SEQ ID NO: 1688 - protein, 15 aa, Artificial Sequence
  Synthetic
YFYPFRLPIKGVPIE

SEQ ID NO: 1689 - protein, 15 aa, Artificial Sequence
  Synthetic
YGDNAGRILAGALAT

SEQ ID NO: 1690 - protein, 15 aa, Artificial Sequence
  Synthetic
YGHATVEMPEWIHAH

SEQ ID NO: 1691 - protein, 15 aa, Artificial Sequence
  Synthetic
YIMNYTGNQQSRWGL

SEQ ID NO: 1692 - protein, 15 aa, Artificial Sequence
  Synthetic
YINNELIPSMNQLSC

SEQ ID NO: 1693 - protein, 15 aa, Artificial Sequence
  Synthetic
YLCTAPGCATQAPVP

SEQ ID NO: 1694 - protein, 15 aa, Artificial Sequence
  Synthetic
YLFTVPIKEAGEDCH

SEQ ID NO: 1695 - protein, 9 aa, Artificial Sequence
  Synthetic
YLHDPEFNL

SEQ ID NO: 1696 - protein, 9 aa, Artificial Sequence
  Synthetic
YLNMSRLFV

SEQ ID NO: 1697 - protein, 9 aa, Artificial Sequence
  Synthetic
YPALGLHEF

SEQ ID NO: 1698 - protein, 10 aa, Artificial Sequence
  Synthetic
YPALGLHEFA

SEQ ID NO: 1699 - protein, 15 aa, Artificial Sequence
  Synthetic
YPALGLHEFAGELST

SEQ ID NO: 1700 - protein, 20 aa, Artificial Sequence
  Synthetic
YPALGLHEFAGELSTLESLM

SEQ ID NO: 1701 - protein, 15 aa, Artificial Sequence
  Synthetic
YPFRLPIKGVPIELQ

SEQ ID NO: 1702 - protein, 9 aa, Artificial Sequence
  Synthetic
YPLLWSYAM

SEQ ID NO: 1703 - protein, 7 aa, Artificial Sequence
  Synthetic
YQQQGRL

SEQ ID NO: 1704 - protein, 10 aa, Artificial Sequence
  Synthetic
YQSEYLAHRR

SEQ ID NO: 1705 - protein, 15 aa, Artificial Sequence
  Synthetic
YRETGPSRASDARAA

SEQ ID NO: 1706 - protein, 20 aa, Artificial Sequence
  Synthetic
YRETGPSRASDARAAHLPTG

SEQ ID NO: 1707 - protein, 25 aa, Artificial Sequence
  Synthetic
YRNASDVLPGHWLQGGWGCYNLSDW

SEQ ID NO: 1708 - protein, 15 aa, Artificial Sequence
  Synthetic
YRRLLRTVLEPIRDA

SEQ ID NO: 1709 - protein, 8 aa, Artificial Sequence
  Synthetic
YRYDSRPP

SEQ ID NO: 1710 - protein, 15 aa, Artificial Sequence
  Synthetic
YSGGDLLGILESRGI

SEQ ID NO: 1711 - protein, 25 aa, Artificial Sequence
  Synthetic
YSKVTATBLLASTNSRLCAVFVRDG

SEQ ID NO: 1712 - protein, 15 aa, Artificial Sequence
  Synthetic
YSPSRSFSYFYPFRL

SEQ ID NO: 1713 - protein, 25 aa, Artificial Sequence
  Synthetic
YTGNQQSRWGLGSPNCHGPDWASPV

SEQ ID NO: 1714 - protein, 9 aa, Artificial Sequence
  Synthetic
YVLLAVLFV

SEQ ID NO: 1715 - protein, 15 aa, Artificial Sequence
  Synthetic
YVYSPGRSFSYFYPF

SEQ ID NO: 1716 - protein, 27 aa, Artificial Sequence
  Synthetic
YYDYEDATFQTYALTGISLCNPAASIC

SEQ ID NO: 1717 - protein, 15 aa, Artificial Sequence
  Synthetic
GDLLGILESRGIKAR

SEQ ID NO: 1718 - protein, 15 aa, Artificial Sequence
  Synthetic
TVPKYVATQGYLISN

SEQ ID NO: 1719 - protein, 9 aa, Artificial Sequence
  Synthetic
KPWDSPQEI

SEQ ID NO: 1720 - protein, 9 aa, Artificial Sequence
  Synthetic
KPWESPQEI

SEQ ID NO: 1721 - protein, 15 aa, Artificial Sequence
  Synthetic
ATYQSEYLAHRRIPP

SEQ ID NO: 1722 - protein, 35 aa, Artificial Sequence
  Synthetic
CMARQAESSEAMAAWSERAGEAMVLVYYESIAYSF

SEQ ID NO: 1723 - protein, 24 aa, Artificial Sequence
  Synthetic
CQVGSSNSAFVSTSSSRRYTEVYL

SEQ ID NO: 1724 - protein, 15 aa, Artificial Sequence
  Synthetic
DDPPATVYRYDSRPP

SEQ ID NO: 1725 - protein, 18 aa, Artificial Sequence
  Synthetic
GALATYQSEYLAHRRIPP

SEQ ID NO: 1726 - protein, 24 aa, Artificial Sequence
  Synthetic
MAAWSERAGEAMVLVYYESIAYSF

SEQ ID NO: 1727 - protein, 13 aa, Artificial Sequence
  Synthetic
MVLVYYESIAYSF

SEQ ID NO: 1728 - protein, 15 aa, Artificial Sequence
  Synthetic
PATVYRYDSRPPEDV

SEQ ID NO: 1729 - protein, 9 aa, Artificial Sequence
  Synthetic
YDSRPPEDV

SEQ ID NO: 1730 - protein, 10 aa, Artificial Sequence
  Synthetic
EPGITTNYDT

SEQ ID NO: 1731 - protein, 20 aa, Artificial Sequence
  Synthetic
GDLRAYKMVYATNPQTQLSN

SEQ ID NO: 1732 - protein, 21 aa, Artificial Sequence
  Synthetic
KNGDVEASAITTYVGFSVVYP

SEQ ID NO: 1733 - protein, 19 aa, Artificial Sequence
  Synthetic
KVTNGSKSYTLRYLASYVK

SEQ ID NO: 1734 - protein, 35 aa, Artificial Sequence
  Synthetic
QALGALKLYFEPGITTNYDTGDLIAYKQTYNASGN

SEQ ID NO: 1735 - protein, 10 aa, Artificial Sequence
  Synthetic
YATNPQTQLS

SEQ ID NO: 1736 - protein, 24 aa, Artificial Sequence
  Synthetic
DNENPLSGKAGGVVKVTYPGLTKV

SEQ ID NO: 1737 - protein, 17 aa, Artificial Sequence
  Synthetic
ENFSSYHGTKPGYVDSI

SEQ ID NO: 1738 - protein, 19 aa, Artificial Sequence
  Synthetic
KVDNAETIKKELGLSLTEP

SEQ ID NO: 1739 - protein, 21 aa, Artificial Sequence
  Synthetic
MEDLQKALEAQSRALRAGLAA

SEQ ID NO: 1740 - protein, 23 aa, Artificial Sequence
  Synthetic
QKGIQKPKSGTQGNYDDDWKGFY

SEQ ID NO: 1741 - protein, 34 aa, Artificial Sequence
  Synthetic
RTGAWQRKDWSRAPPPPEERQESRSQTPAPKPSR

SEQ ID NO: 1742 - protein, 29 aa, Artificial Sequence
  Synthetic
AAGASQSRRPRPPRHARAQHLPEMTPAVT

SEQ ID NO: 1743 - protein, 28 aa, Artificial Sequence
  Synthetic
CVTSWLWSEGEGAVFYRVDLHFINLGTP

SEQ ID NO: 1744 - protein, 27 aa, Artificial Sequence
  Synthetic
FRVGGTRWHRLLRMPVRGLDGDTAPLP

SEQ ID NO: 1745 - protein, 28 aa, Artificial Sequence
  Synthetic
GRKIRMRCRAIDGDVTFCRPKSPVYVGN

SEQ ID NO: 1746 - protein, 28 aa, Artificial Sequence
  Synthetic
GTPPLDEDGRWDPALMYNPCGPEPPAHV

SEQ ID NO: 1747 - protein, 54 aa, Artificial Sequence
  Synthetic
GVHANLHVAFHRSSSEKIHSNEISSDSIGVLGYQKTVDHTKVNSKLSLFFEIKS

SEQ ID NO: 1748 - protein, 30 aa, Artificial Sequence
  Synthetic
MASTTPITMEDLQKALEAQSRALRAGLAAG

SEQ ID NO: 1749 - protein, 34 aa, Artificial Sequence
  Synthetic
PELGPPTNPFQAAVARGLRPPLHDPDTEAPTEAC

SEQ ID NO: 1750 - protein, 26 aa, Artificial Sequence
  Synthetic
PLPPHTTERIETRSARHPWRIRFGAP

SEQ ID NO: 1751 - protein, 27 aa, Artificial Sequence
  Synthetic
SRAPPPPEERQESRSQTPAPKPSRAPP

SEQ ID NO: 1752 - protein, 28 aa, Artificial Sequence
  Synthetic
SRAPPQQPQPPRMQTGRGGSAPRPELGP

SEQ ID NO: 1753 - protein, 27 aa, Artificial Sequence
  Synthetic
TPAVTPEGPAPPRTGAWQRKDWSRAPP

SEQ ID NO: 1754 - protein, 29 aa, Artificial Sequence
  Synthetic
VRAYNQPAGDVRGVWGKGERTYAEQDFRV

SEQ ID NO: 1755 - protein, 20 aa, Artificial Sequence
  Synthetic
AFGHSDAACWGFPTDTVMSV

SEQ ID NO: 1756 - protein, 21 aa, Artificial Sequence
  Synthetic
CARIWNGTQRACTFWAVNAYS

SEQ ID NO: 1757 - protein, 22 aa, Artificial Sequence
  Synthetic
EEAFTYLCTAPGCATQTPVPVR

SEQ ID NO: 1758 - protein, 20 aa, Artificial Sequence
  Synthetic
FAPWDLEATGACICEIPTDV

SEQ ID NO: 1759 - protein, 17 aa, Artificial Sequence
  Synthetic
GEDVGAFPPGKFVTAAL

SEQ ID NO: 1760 - protein, 20 aa, Artificial Sequence
  Synthetic
GEVWVTPVIGSQARKCGLHI

SEQ ID NO: 1761 - protein, 20 aa, Artificial Sequence
  Synthetic
GQLEVQVPPDPGDLVEYIMN

SEQ ID NO: 1762 - protein, 20 aa, Artificial Sequence
  Synthetic
GSYYKQYHPTACEVEPAFGH

SEQ ID NO: 1763 - protein, 20 aa, Artificial Sequence
  Synthetic
IHAHTTSDPWHPPGPLGLKF

SEQ ID NO: 1764 - protein, 20 aa, Artificial Sequence
  Synthetic
IMNYTGNQQSRWGLGSPNCH

SEQ ID NO: 1765 - protein, 20 aa, Artificial Sequence
  Synthetic
LHIRAGPYGHATVEMPEWIH

SEQ ID NO: 1766 - protein, 20 aa, Artificial Sequence
  Synthetic
LKFKTVRPVALPRALAPPRN

SEQ ID NO: 1767 - protein, 22 aa, Artificial Sequence
  Synthetic
LNTPPPYQVSCGGESDRASAGH

SEQ ID NO: 1768 - protein, 20 aa, Artificial Sequence
  Synthetic
NCHGPDWASPVCQRHSPDCS

SEQ ID NO: 1769 - protein, 20 aa, Artificial Sequence
  Synthetic
PDCSRLVGATPERPRLRLVD

SEQ ID NO: 1770 - protein, 20 aa, Artificial Sequence
  Synthetic
PRNVRVTGCYQCGTPALVEG

SEQ ID NO: 1771 - protein, 21 aa, Artificial Sequence
  Synthetic
PTDVSCEGLGAWVPTAPCARI

SEQ ID NO: 1772 - protein, 20 aa, Artificial Sequence
  Synthetic
RLVDADDPLLRTAPGPGEVW

SEQ ID NO: 1773 - protein, 20 aa, Artificial Sequence
  Synthetic
SVFALASYVQHPHKTVRVKF

SEQ ID NO: 1774 - protein, 20 aa, Artificial Sequence
  Synthetic
VEGLAPGGGNCHLTVNGEDV

SEQ ID NO: 1775 - protein, 20 aa, Artificial Sequence
  Synthetic
VKFHTETRTVWQLSVAGVSC

SEQ ID NO: 1776 - protein, 20 aa, Artificial Sequence
  Synthetic
VPVRLAGVGFESKIVDGGCF

SEQ ID NO: 1777 - protein, 20 aa, Artificial Sequence
  Synthetic
VSCNVTTEHPFCNTPHGQLE

SEQ ID NO: 1778 - protein, 12 aa, Artificial Sequence
  Synthetic
AAASSPDAHVPF

SEQ ID NO: 1779 - protein, 7 aa, Artificial Sequence
  Synthetic
AASSPDA

SEQ ID NO: 1780 - protein, 12 aa, Artificial Sequence
  Synthetic
AKLGAAASSPDA

SEQ ID NO: 1781 - protein, 12 aa, Artificial Sequence
  Synthetic
AMKPYEVTPTRM

SEQ ID NO: 1782 - protein, 25 aa, Artificial Sequence
  Synthetic
AMTHLSPALADVPYVLVKTNMVVTS

SEQ ID NO: 1783 - protein, 12 aa, Artificial Sequence
  Synthetic
ASSPDAHVPFCF

SEQ ID NO: 1784 - protein, 25 aa, Artificial Sequence
  Synthetic
ASSPDAHVPFCFGKDLKRPGSSPME

SEQ ID NO: 1785 - protein, 12 aa, Artificial Sequence
  Synthetic
CFGKDLKRPGSS

SEQ ID NO: 1786 - protein, 25 aa, Artificial Sequence
  Synthetic
CFGKDLKRPGSSPMEVMLRAVFMQQ

SEQ ID NO: 1787 - protein, 12 aa, Artificial Sequence
  Synthetic
CGIAAKLGAAAS

SEQ ID NO: 1788 - protein, 25 aa, Artificial Sequence
  Synthetic
CGIAAKLGAAASSPDAHVPFCFGKD

SEQ ID NO: 1789 - protein, 12 aa, Artificial Sequence
  Synthetic
DAHVPFCFGKDL

SEQ ID NO: 1790 - protein, 12 aa, Artificial Sequence
  Synthetic
DLKRPGSSPMEV

SEQ ID NO: 1791 - protein, 12 aa, Artificial Sequence
  Synthetic
DVPYVLVKTNMV

SEQ ID NO: 1792 - protein, 26 aa, Artificial Sequence
  Synthetic
DVPYVLVKTNMVVTSVAMKPYEVTPT

SEQ ID NO: 1793 - protein, 12 aa, Artificial Sequence
  Synthetic
EVMLRAVFMQQR

SEQ ID NO: 1794 - protein, 12 aa, Artificial Sequence
  Synthetic
FEGKPALELIRM

SEQ ID NO: 1795 - protein, 12 aa, Artificial Sequence
  Synthetic
FLGPKQLTFEGK

SEQ ID NO: 1796 - protein, 25 aa, Artificial Sequence
  Synthetic
FLGPKQLTFEGKPALELIRMVECSG

SEQ ID NO: 1797 - protein, 17 aa, Artificial Sequence
  Synthetic
FMQQRPLRMFLGPKQLT

SEQ ID NO: 1798 - protein, 12 aa, Artificial Sequence
  Synthetic
GKDLKRPGSSPM

SEQ ID NO: 1799 - protein, 13 aa, Artificial Sequence
  Synthetic
GKDLKRPGSSPME

SEQ ID NO: 1800 - protein, 12 aa, Artificial Sequence
  Synthetic
GKPALELIRMVE

SEQ ID NO: 1801 - protein, 12 aa, Artificial Sequence
  Synthetic
GPKQLTFEGKPA

SEQ ID NO: 1802 - protein, 12 aa, Artificial Sequence
  Synthetic
HVPFCFGKDLKR

SEQ ID NO: 1803 - protein, 12 aa, Artificial Sequence
  Synthetic
IAAKLGAAASSP

SEQ ID NO: 1804 - protein, 12 aa, Artificial Sequence
  Synthetic
KPYEVTPTRMLV

SEQ ID NO: 1805 - protein, 12 aa, Artificial Sequence
  Synthetic
KQLTFEGKPALE

SEQ ID NO: 1806 - protein, 12 aa, Artificial Sequence
  Synthetic
KRPGSSPMEVML

SEQ ID NO: 1807 - protein, 12 aa, Artificial Sequence
  Synthetic
LELIRMVECSGK

SEQ ID NO: 1808 - protein, 12 aa, Artificial Sequence
  Synthetic
LGAAASSPDAHV

SEQ ID NO: 1809 - protein, 12 aa, Artificial Sequence
  Synthetic
LIRMVECSGKQD

SEQ ID NO: 1810 - protein, 12 aa, Artificial Sequence
  Synthetic
LVCGIAAKLGAA

SEQ ID NO: 1811 - protein, 11 aa, Artificial Sequence
  Synthetic
MKPYEVTPTRM

SEQ ID NO: 1812 - protein, 12 aa, Artificial Sequence
  Synthetic
MLRAVFMQQRPL

SEQ ID NO: 1813 - protein, 8 aa, Artificial Sequence
  Synthetic
MQQRPLRM

SEQ ID NO: 1814 - protein, 12 aa, Artificial Sequence
  Synthetic
MQQRPLRMFLGP

SEQ ID NO: 1815 - protein, 12 aa, Artificial Sequence
  Synthetic
MVVTSVAMKPYE

SEQ ID NO: 1816 - protein, 25 aa, Artificial Sequence
  Synthetic
MVVTSVAMKPYEVTPTRMLVCGIAA

SEQ ID NO: 1817 - protein, 12 aa, Artificial Sequence
  Synthetic
PALELIRMVECS

SEQ ID NO: 1818 - protein, 14 aa, Artificial Sequence
  Synthetic
PALELIRMVECSGK

SEQ ID NO: 1819 - protein, 12 aa, Artificial Sequence
  Synthetic
PFCFGKDLKRPG

SEQ ID NO: 1820 - protein, 12 aa, Artificial Sequence
  Synthetic
PGSSPMEVMLRA

SEQ ID NO: 1821 - protein, 14 aa, Artificial Sequence
  Synthetic
PGSSPMEVMLRAVF

SEQ ID NO: 1822 - protein, 9 aa, Artificial Sequence
  Synthetic
PKQLTFEGK

SEQ ID NO: 1823 - protein, 12 aa, Artificial Sequence
  Synthetic
PLRMFLGPKQLT

SEQ ID NO: 1824 - protein, 12 aa, Artificial Sequence
  Synthetic
PTRMLVCGIAAK

SEQ ID NO: 1825 - protein, 12 aa, Artificial Sequence
  Synthetic
PYVLVKTNMVVT

SEQ ID NO: 1826 - protein, 25 aa, Artificial Sequence
  Synthetic
QLTFEGKPALELIRMVECSGKQDCP

SEQ ID NO: 1827 - protein, 12 aa, Artificial Sequence
  Synthetic
QRPLRMFLGPKQ

SEQ ID NO: 1828 - protein, 12 aa, Artificial Sequence
  Synthetic
RAVFMQQRPLRM

SEQ ID NO: 1829 - protein, 12 aa, Artificial Sequence
  Synthetic
RMFLGPKQLTFE

SEQ ID NO: 1830 - protein, 12 aa, Artificial Sequence
  Synthetic
RMLVCGIAAKLG

SEQ ID NO: 1831 - protein, 12 aa, Artificial Sequence
  Synthetic
RMVECSGKQDCP

SEQ ID NO: 1832 - protein, 12 aa, Artificial Sequence
  Synthetic
SPDAHVPFCFGK

SEQ ID NO: 1833 - protein, 12 aa, Artificial Sequence
  Synthetic
SSPMEVMLRAVF

SEQ ID NO: 1834 - protein, 25 aa, Artificial Sequence
  Synthetic
SSPMEVMLRAVFMQQRPLRMFLGPK

SEQ ID NO: 1835 - protein, 12 aa, Artificial Sequence
  Synthetic
SVAMKPYEVTPT

SEQ ID NO: 1836 - protein, 10 aa, Artificial Sequence
  Synthetic
VECSGKQDCP

SEQ ID NO: 1837 - protein, 12 aa, Artificial Sequence
  Synthetic
VFMQQRPLRMFL

SEQ ID NO: 1838 - protein, 25 aa, Artificial Sequence
  Synthetic
VFMQQRPLRMFLGPKQLTFEGKPAL

SEQ ID NO: 1839 - protein, 12 aa, Artificial Sequence
  Synthetic
VKTNMVVTSVAM

SEQ ID NO: 1840 - protein, 12 aa, Artificial Sequence
  Synthetic
VLVKTNMVVTSV

SEQ ID NO: 1841 - protein, 12 aa, Artificial Sequence
  Synthetic
VTPTRMLVCGIA

SEQ ID NO: 1842 - protein, 12 aa, Artificial Sequence
  Synthetic
VTSVAMKPYEVT

SEQ ID NO: 1843 - protein, 12 aa, Artificial Sequence
  Synthetic
YEVTPTRMLVCG

SEQ ID NO: 1844 - protein, 25 aa, Artificial Sequence
  Synthetic
YEVTPTRMLVCGIAAKLGAAASSPD

SEQ ID NO: 1845 - protein, 17 aa, Artificial Sequence
  Synthetic
CASPYEGRYRDMYDALR

SEQ ID NO: 1846 - protein, 11 aa, Artificial Sequence
  Synthetic
CAVFVRDGQSV

SEQ ID NO: 1847 - protein, 9 aa, Artificial Sequence
  Synthetic
CITTIYKTG

SEQ ID NO: 1848 - protein, 10 aa, Artificial Sequence
  Synthetic
CPNGTRALTV

SEQ ID NO: 1849 - protein, 14 aa, Artificial Sequence
  Synthetic
DALRRLLYMIYMSG

SEQ ID NO: 1850 - protein, 26 aa, Artificial Sequence
  Synthetic
GNRGRGQRRDWSRAPPPPEERQETRS

SEQ ID NO: 1851 - protein, 13 aa, Artificial Sequence
  Synthetic
GQPAADHYYSKVT

SEQ ID NO: 1852 - protein, 19 aa, Artificial Sequence
  Synthetic
GSPNCHGPDWASPVCQRHS

SEQ ID NO: 1853 - protein, 17 aa, Artificial Sequence
  Synthetic
HKSLSTNLDVTNSIEHQ

SEQ ID NO: 1854 - protein, 12 aa, Artificial Sequence
  Synthetic
LFTQQGGAYGRC

SEQ ID NO: 1855 - protein, 22 aa, Artificial Sequence
  Synthetic
LIGLLAIAGIRLHRAAIYTAEI

SEQ ID NO: 1856 - protein, 15 aa, Artificial Sequence
  Synthetic
PDTAADSELRRWIKY

SEQ ID NO: 1857 - protein, 17 aa, Artificial Sequence
  Synthetic
PNCHGPDWASPVCQRHS

SEQ ID NO: 1858 - protein, 24 aa, Artificial Sequence
  Synthetic
QTPAPKPSRAPPQQPQPPRMQTGR

SEQ ID NO: 1859 - protein, 18 aa, Artificial Sequence
  Synthetic
RAGLTAGASQSRRPRPPR

SEQ ID NO: 1860 - protein, 24 aa, Artificial Sequence
  Synthetic
RFGAPQAFLAGLLLAAVAVGTARA

SEQ ID NO: 1861 - protein, 16 aa, Artificial Sequence
  Synthetic
RGNAELQTYLRQITPG

SEQ ID NO: 1862 - protein, 15 aa, Artificial Sequence
  Synthetic
RVHVSKEEQYYDYED

SEQ ID NO: 1863 - protein, 11 aa, Artificial Sequence
  Synthetic
SIYGLYDGTYL

SEQ ID NO: 1864 - protein, 14 aa, Artificial Sequence
  Synthetic
SKVTATRLLASTNS

SEQ ID NO: 1865 - protein, 16 aa, Artificial Sequence
  Synthetic
TQQGGAYGRCPNGTRA

SEQ ID NO: 1866 - protein, 12 aa, Artificial Sequence
  Synthetic
VAPGIVIPPKAL

SEQ ID NO: 1867 - protein, 17 aa, Artificial Sequence
  Synthetic
DSRPPEDVFQNGFTAWG

SEQ ID NO: 1868 - protein, 15 aa, Artificial Sequence
  Synthetic
EHRMQEAVEAERAGR

SEQ ID NO: 1869 - protein, 22 aa, Artificial Sequence
  Synthetic
ETCFQQACKGKIQALCENPEWA

SEQ ID NO: 1870 - protein, 22 aa, Artificial Sequence
  Synthetic
EYVDTYGDNAGRILAGALATYQ

SEQ ID NO: 1871 - protein, 14 aa, Artificial Sequence
  Synthetic
HRRIPPENIRRVTR

SEQ ID NO: 1872 - protein, 9 aa, Artificial Sequence
  Synthetic
MARQAESSE

SEQ ID NO: 1873 - protein, 12 aa, Artificial Sequence
  Synthetic
MQEAVEAERAGR

SEQ ID NO: 1874 - protein, 15 aa, Artificial Sequence
  Synthetic
SQQTRANPNPYTSRR

SEQ ID NO: 1875 - protein, 24 aa, Artificial Sequence
  Synthetic
TRANPNPYTSRRSVASIVGTLVHG

SEQ ID NO: 1876 - protein, 12 aa, Artificial Sequence
  Synthetic
TVYRYDSRPPED

SEQ ID NO: 1877 - protein, 7 aa, Artificial Sequence
  Synthetic
NDRNLLD

SEQ ID NO: 1878 - protein, 29 aa, Artificial Sequence
  Synthetic
NMEDEADQYFSHDDPISSDQSRFGWFENK

SEQ ID NO: 1879 - protein, 20 aa, Artificial Sequence
  Synthetic
SRASDARAAHLPTGTPLDID

SEQ ID NO: 1880 - protein, 11 aa, Artificial Sequence
  Synthetic
EDVFQNGFTAW

SEQ ID NO: 1881 - protein, 17 aa, Artificial Sequence
  Synthetic
AEGSSSVEYINNWEQAK

SEQ ID NO: 1882 - protein, 14 aa, Artificial Sequence
  Synthetic
GPIKNKMSESPNKT

SEQ ID NO: 1883 - protein, 32 aa, Artificial Sequence
  Synthetic
GPKLTGALIGILSLFVESPGQLIQRITDDPDV

SEQ ID NO: 1884 - protein, 14 aa, Artificial Sequence
  Synthetic
GYQKTVDHTKVNSK

SEQ ID NO: 1885 - protein, 5 aa, Artificial Sequence
  Synthetic
KTVDH

SEQ ID NO: 1886 - protein, 6 aa, Artificial Sequence
  Synthetic
SESPNK

SEQ ID NO: 1887 - protein, 20 aa, Artificial Sequence
  Synthetic
AEGSSSVEYINNWEQAKALS

SEQ ID NO: 1888 - protein, 20 aa, Artificial Sequence
  Synthetic
AQAIPLVGELVDIGFAAYNF

SEQ ID NO: 1889 - protein, 20 aa, Artificial Sequence
  Synthetic
ASRVVLSLPFAEGSSSVEYI

SEQ ID NO: 1890 - protein, 20 aa, Artificial Sequence
  Synthetic
CINLDWDVIRDKTKTKIESL

SEQ ID NO: 1891 - protein, 20 aa, Artificial Sequence
  Synthetic
CRAIDGDVTFCRPKSPVYVG

SEQ ID NO: 1892 - protein, 20 aa, Artificial Sequence
  Synthetic
CRPKSPVYVGNGVHANLHVA

SEQ ID NO: 1893 - protein, 20 aa, Artificial Sequence
  Synthetic
DAAGYSVDNENPLSGKAGGV

SEQ ID NO: 1894 - protein, 20 aa, Artificial Sequence
  Synthetic
DKTKTKIESLKEHGPIKNKM

SEQ ID NO: 1895 - protein, 20 aa, Artificial Sequence
  Synthetic
EEFIKRFGDGASRVVLSLPF

SEQ ID NO: 1896 - protein, 20 aa, Artificial Sequence
  Synthetic
EKAKQYLEEFHQTALEHPEL

SEQ ID NO: 1897 - protein, 20 aa, Artificial Sequence
  Synthetic
FHRSSSEKIHSNEISSDSIG

SEQ ID NO: 1898 - protein, 20 aa, Artificial Sequence
  Synthetic
GADDVVDSSKSFVMENFSSY

SEQ ID NO: 1899 - protein, 20 aa, Artificial Sequence
  Synthetic
GKRGQDAMYEYMAQACAGNR

SEQ ID NO: 1900 - protein, 20 aa, Artificial Sequence
  Synthetic
GSVMGIADGAVHHNTEEIVA

SEQ ID NO: 1901 - protein, 20 aa, Artificial Sequence
  Synthetic
GTQGNYDDDWKGFYSTDNKY

SEQ ID NO: 1902 - protein, 20 aa, Artificial Sequence
  Synthetic
HDGYAVSWNTVEDSIIRTGF

SEQ ID NO: 1903 - protein, 20 aa, Artificial Sequence
  Synthetic
HGTKPGYVDSIQKGIQKPKS

SEQ ID NO: 1904 - protein, 20 aa, Artificial Sequence
  Synthetic
HQTALEHPELSELKTVTGTN

SEQ ID NO: 1905 - protein, 20 aa, Artificial Sequence
  Synthetic
IQKGIQKPKSGTQGNYDDDW

SEQ ID NO: 1906 - protein, 20 aa, Artificial Sequence
  Synthetic
KEHGPIKNKMSESPNKTVSE

SEQ ID NO: 1907 - protein, 20 aa, Artificial Sequence
  Synthetic
KGFYSTDNKYDAAGYSVDNE

SEQ ID NO: 1908 - protein, 20 aa, Artificial Sequence
  Synthetic
LDVNKSKTHISVNGRKIRMR

SEQ ID NO: 1909 - protein, 18 aa, Artificial Sequence
  Synthetic
MASTIPITMEDLQKALEA

SEQ ID NO: 1910 - protein, 20 aa, Artificial Sequence
  Synthetic
NGVHANLHVAFHRSSSEKIH

SEQ ID NO: 1911 - protein, 20 aa, Artificial Sequence
  Synthetic
NNWEQAKALSVELEINFETR

SEQ ID NO: 1912 - protein, 20 aa, Artificial Sequence
  Synthetic
NPLSGKAGGVVKVTYPGLTK

SEQ ID NO: 1913 - protein, 20 aa, Artificial Sequence
  Synthetic
PVFAGANYAAWAVNVAQVID

SEQ ID NO: 1914 - protein, 20 aa, Artificial Sequence
  Synthetic
SELKTVTGTNPVFAGANYAA

SEQ ID NO: 1915 - protein, 20 aa, Artificial Sequence
  Synthetic
SESPNKTVSEEKAKQYLEEF

SEQ ID NO: 1916 - protein, 20 aa, Artificial Sequence
  Synthetic
SETADNLEKTTAALSILPGI

SEQ ID NO: 1917 - protein, 20 aa, Artificial Sequence
  Synthetic
SFVMENFSSYHGTKPGYVDS

SEQ ID NO: 1918 - protein, 20 aa, Artificial Sequence
  Synthetic
SNEISSDSIGVLGYQKTVDH

SEQ ID NO: 1919 - protein, 20 aa, Artificial Sequence
  Synthetic
SPGHKTQPFLHDGYAVSWNT

SEQ ID NO: 1920 - protein, 20 aa, Artificial Sequence
  Synthetic
SVNGRKIRMRCRAIDGDVTF

SEQ ID NO: 1921 - protein, 20 aa, Artificial Sequence
  Synthetic
TAALSILPGIGSVMGIADGA

SEQ ID NO: 1922 - protein, 20 aa, Artificial Sequence
  Synthetic
TAENTPLPIAGVLLPTIPGK

SEQ ID NO: 1923 - protein, 20 aa, Artificial Sequence
  Synthetic
TEPLMEQVGTEEFIKRFGDG

SEQ ID NO: 1924 - protein, 20 aa, Artificial Sequence
  Synthetic
TIKKELGLSLTEPLMEQVGT

SEQ ID NO: 1925 - protein, 15 aa, Artificial Sequence
  Synthetic
TKVNSKLSLFFEIKS

SEQ ID NO: 1926 - protein, 20 aa, Artificial Sequence
  Synthetic
VEDSIIRTGFQGESGHDIKI

SEQ ID NO: 1927 - protein, 20 aa, Artificial Sequence
  Synthetic
VELEINFETRGKRGQDAMYE

SEQ ID NO: 1928 - protein, 20 aa, Artificial Sequence
  Synthetic
VESIINLFQVVHNSYNRPAY

SEQ ID NO: 1929 - protein, 20 aa, Artificial Sequence
  Synthetic
VHNSYNRPAYSPGHKTQPFL

SEQ ID NO: 1930 - protein, 20 aa, Artificial Sequence
  Synthetic
VKVTYPGLTKVLALKVDNAE

SEQ ID NO: 1931 - protein, 20 aa, Artificial Sequence
  Synthetic
VLALKVDNAETIKKELGLSL

SEQ ID NO: 1932 - protein, 20 aa, Artificial Sequence
  Synthetic
VLGYQKTVDHTKVNSKLSLF

SEQ ID NO: 1933 - protein, 20 aa, Artificial Sequence
  Synthetic
VRRSVGSSLSCINLDWDVIR

SEQ ID NO: 1934 - protein, 20 aa, Artificial Sequence
  Synthetic
WAVNVAQVIDSETADNLEKT

SEQ ID NO: 1935 - protein, 20 aa, Artificial Sequence
  Synthetic
YMAQACAGNRVRRSVGSSLS

SEQ ID NO: 1936 - protein, 15 aa, Artificial Sequence
  Synthetic
AKAPPAPKPAPQPGP

SEQ ID NO: 1937 - protein, 10 aa, Artificial Sequence
  Synthetic
APKPAPQPGP

SEQ ID NO: 1938 - protein, 15 aa, Artificial Sequence
  Synthetic
APKPAPQPGPQPPQP

SEQ ID NO: 1939 - protein, 15 aa, Artificial Sequence
  Synthetic
AQTRTPLQCTMTEIF

SEQ ID NO: 1940 - protein, 19 aa, Artificial Sequence
  Synthetic
ASRGTNMEDEADQYFSHDD

SEQ ID NO: 1941 - protein, 5 aa, Artificial Sequence
  Synthetic
ATIRR

SEQ ID NO: 1942 - protein, 5 aa, Artificial Sequence
  Synthetic
DNRAG

SEQ ID NO: 1943 - protein, 15 aa, Artificial Sequence
  Synthetic
EAPAPQPPAGRELSA

SEQ ID NO: 1944 - protein, 20 aa, Artificial Sequence
  Synthetic
EMVRRSAGKVSSTLASELGI

SEQ ID NO: 1945 - protein, 5 aa, Artificial Sequence
  Synthetic
GASEL

SEQ ID NO: 1946 - protein, 10 aa, Artificial Sequence
  Synthetic
GDALAGGAVP

SEQ ID NO: 1947 - protein, 10 aa, Artificial Sequence
  Synthetic
GDAPAGGAVP

SEQ ID NO: 1948 - protein, 7 aa, Artificial Sequence
  Synthetic
GDTWDDD

SEQ ID NO: 1949 - protein, 5 aa, Artificial Sequence
  Synthetic
GERQH

SEQ ID NO: 1950 - protein, 5 aa, Artificial Sequence
  Synthetic
GGAVP

SEQ ID NO: 1951 - protein, 5 aa, Artificial Sequence
  Synthetic
GGFGP

SEQ ID NO: 1952 - protein, 10 aa, Artificial Sequence
  Synthetic
GGFGPGGFGP

SEQ ID NO: 1953 - protein, 10 aa, Artificial Sequence
  Synthetic
GGFGPVLDGW

SEQ ID NO: 1954 - protein, 20 aa, Artificial Sequence
  Synthetic
GGKEDRRVKQSRGEARESYR

SEQ ID NO: 1955 - protein, 6 aa, Artificial Sequence
  Synthetic
GILLEN

SEQ ID NO: 1956 - protein, 6 aa, Artificial Sequence
  Synthetic
GIRRFL

SEQ ID NO: 1957 - protein, 20 aa, Artificial Sequence
  Synthetic
HDDPISSDQSRFGWFENKEI

SEQ ID NO: 1958 - protein, 17 aa, Artificial Sequence
  Synthetic
HEFAGELSTLESLMNLY

SEQ ID NO: 1959 - protein, 8 aa, Artificial Sequence
  Synthetic
HLGGLAGY

SEQ ID NO: 1960 - protein, 21 aa, Artificial Sequence
  Synthetic
HTTEDKISRAVGPRQAQVSFL

SEQ ID NO: 1961 - protein, 20 aa, Artificial Sequence
  Synthetic
ICDIDTYIVEAGLASFILTI

SEQ ID NO: 1962 - protein, 20 aa, Artificial Sequence
  Synthetic
IIIVPIPGDSSITTRSRLLD

SEQ ID NO: 1963 - protein, 20 aa, Artificial Sequence
  Synthetic
ILDIKRTPGNKPRIAEMICD

SEQ ID NO: 1964 - protein, 6 aa, Artificial Sequence
  Synthetic
KALLYR

SEQ ID NO: 1965 - protein, 20 aa, Artificial Sequence
  Synthetic
KPPITSGSGGAIRGIKHIII

SEQ ID NO: 1966 - protein, 6 aa, Artificial Sequence
  Synthetic
LAGSGL

SEQ ID NO: 1967 - protein, 20 aa, Artificial Sequence
  Synthetic
LGITAEDARLVSEIAMHTTE

SEQ ID NO: 1968 - protein, 18 aa, Artificial Sequence
  Synthetic
LGTILAQIWVLLAKAVTA

SEQ ID NO: 1969 - protein, 18 aa, Artificial Sequence
  Synthetic
LPTGTPLDIDTASESSQD

SEQ ID NO: 1970 - protein, 17 aa, Artificial Sequence
  Synthetic
MATLLRSLALFKRNKDK

SEQ ID NO: 1971 - protein, 6 aa, Artificial Sequence
  Synthetic
PAPQPP

SEQ ID NO: 1972 - protein, 20 aa, Artificial Sequence
  Synthetic
PDTAADSELRRWIKYTQQRR

SEQ ID NO: 1973 - protein, 20 aa, Artificial Sequence
  Synthetic
PKLTGALIGILSLFVESPGQ

SEQ ID NO: 1974 - protein, 3 aa, Artificial Sequence
  Synthetic
PQP

SEQ ID NO: 1975 - protein, 5 aa, Artificial Sequence
  Synthetic
PQPGP

SEQ ID NO: 1976 - protein, 15 aa, Artificial Sequence
  Synthetic
PQPGPQPPQPPQPQP

SEQ ID NO: 1977 - protein, 20 aa, Artificial Sequence
  Synthetic
QDPQDSRRSAEPLLSCKPWQ

SEQ ID NO: 1978 - protein, 19 aa, Artificial Sequence
  Synthetic
QRRVVGEFRLERKWLDVVR

SEQ ID NO: 1979 - protein, 5 aa, Artificial Sequence
  Synthetic
RELSA

SEQ ID NO: 1980 - protein, 5 aa, Artificial Sequence
  Synthetic
RFAPQ

SEQ ID NO: 1981 - protein, 20 aa, Artificial Sequence
  Synthetic
SIQNKFSAGSYPLLWSYAMG

SEQ ID NO: 1982 - protein, 9 aa, Artificial Sequence
  Synthetic
SITLQAGAH

SEQ ID NO: 1983 - protein, 6 aa, Artificial Sequence
  Synthetic
SLQPED

SEQ ID NO: 1984 - protein, 8 aa, Artificial Sequence
  Synthetic
SNALSKRL

SEQ ID NO: 1985 - protein, 20 aa, Artificial Sequence
  Synthetic
SPGQLIQRITDDPDVSIRLL

SEQ ID NO: 1986 - protein, 8 aa, Artificial Sequence
  Synthetic
TELPSIPG

SEQ ID NO: 1987 - protein, 7 aa, Artificial Sequence
  Synthetic
TFTLANK

SEQ ID NO: 1988 - protein, 5 aa, Artificial Sequence
  Synthetic
TWDDD

SEQ ID NO: 1989 - protein, 20 aa, Artificial Sequence
  Synthetic
VSFLQGDQSENELPRLGGKE

SEQ ID NO: 1990 - protein, 17 aa, Artificial Sequence
  Synthetic
WQESRKNKAQTRTPLQC

SEQ ID NO: 1991 - protein, 20 aa, Artificial Sequence
  Synthetic
YAMGVGVELENSMGGLNFGR

SEQ ID NO: 1992 - protein, 18 aa, Artificial Sequence
  Synthetic
YQQMGKPAPYMVNLENSI

SEQ ID NO: 1993 - protein, 15 aa, Artificial Sequence
  Synthetic
MTRSSHQSLVIKLMP

SEQ ID NO: 1994 - protein, 15 aa, Artificial Sequence
  Synthetic
PIRDALNAMTQNIRP

SEQ ID NO: 1995 - protein, 24 aa, Artificial Sequence
  Synthetic
ALLNTPPPYQVSCGGESDRASAGH

SEQ ID NO: 1996 - protein, 21 aa, Artificial Sequence
  Synthetic
GLGSPNCHGPDWASPVCQRHS

SEQ ID NO: 1997 - protein, 28 aa, Artificial Sequence
  Synthetic
GLGSPNCHGPDWASPVCQRHSPDCSRLV

SEQ ID NO: 1998 - protein, 26 aa, Artificial Sequence
  Synthetic
NYTGNQQSRWGLGSPNCHGPDWASPV

SEQ ID NO: 1999 - protein, 20 aa, Artificial Sequence
  Synthetic
TLPQPPCAHGQHYGHHHHQL

SEQ ID NO: 2000 - protein, 26 aa, Artificial Sequence
  Synthetic
TVRVKFHTETRTVWQLSVAGVSCNVT

SEQ ID NO: 2001 - protein, 15 aa, Artificial Sequence
  Synthetic
ASYFNPGGSYYKQYH

SEQ ID NO: 2002 - protein, 15 aa, Artificial Sequence
  Synthetic
FALASYVQHPHKTVR

SEQ ID NO: 2003 - protein, 21 aa, Artificial Sequence
  Synthetic
GGESDRASARVIDPAAQSFTG

SEQ ID NO: 2004 - protein, 18 aa, Artificial Sequence
  Synthetic
GPGEVWVTPVIGSQARKC

SEQ ID NO: 2005 - protein, 14 aa, Artificial Sequence
  Synthetic
GSQARKCGLHIRAG

SEQ ID NO: 2006 - protein, 25 aa, Artificial Sequence
  Synthetic
LVGATPERPRLRLVDADDPLLRTAP

SEQ ID NO: 2007 - protein, 14 aa, Artificial Sequence
  Synthetic
TAPGPGEVWVTPVI

SEQ ID NO: 2008 - protein, 15 aa, Artificial Sequence
  Synthetic
FIVLSIAYPTLSEIK

SEQ ID NO: 2009 - protein, 32 aa, Artificial Sequence
  Synthetic
ETCFQQACKGKIQALCENPEWAPLKDNRIPSY

SEQ ID NO: 2010 - protein, 10 aa, Artificial Sequence
  Synthetic
LPRLGGKEDR

SEQ ID NO: 2011 - protein, 10 aa, Artificial Sequence
  Synthetic
MSKTEWNASQ

SEQ ID NO: 2012 - protein, 10 aa, Artificial Sequence
  Synthetic
SRFGWFENKE

SEQ ID NO: 2013 - protein, 29 aa, Artificial Sequence
  Synthetic
EACVTSWLWSEGEGAVFYRVDLHFINLGT

SEQ ID NO: 2014 - protein, 21 aa, Artificial Sequence
  Synthetic
MDFWCVEHDRPPPATPTSLTT

SEQ ID NO: 2015 - protein, 25 aa, Artificial Sequence
  Synthetic
PFLGHDGHHGGTLRVGQHHRNASDV

SEQ ID NO: 2016 - protein, 21 aa, Artificial Sequence
  Synthetic
RVKFHTETRTVWQLSVAGVSC

SEQ ID NO: 2017 - protein, 13 aa, Artificial Sequence
  Synthetic
AEEQARHVKNGLE

SEQ ID NO: 2018 - protein, 13 aa, Artificial Sequence
  Synthetic
ESPQEISKHQALG

SEQ ID NO: 2019 - protein, 15 aa, Artificial Sequence
  Synthetic
GVGVELENSMGGLNF

SEQ ID NO: 2020 - protein, 20 aa, Artificial Sequence
  Synthetic
IKGANDLAKFHQMLMKIIMK

SEQ ID NO: 2021 - protein, 14 aa, Artificial Sequence
  Synthetic
MSKTLHAQLGFKKT

SEQ ID NO: 2022 - protein, 13 aa, Artificial Sequence
  Synthetic
NASGLSRPSPSAH

SEQ ID NO: 2023 - protein, 14 aa, Artificial Sequence
  Synthetic
VRVIDPSLGDRKDE

SEQ ID NO: 2024 - protein, 9 aa, Artificial Sequence
  Synthetic
DLSDGDLLV

SEQ ID NO: 2025 - protein, 10 aa, Artificial Sequence
  Synthetic
EAERAGRGTG

SEQ ID NO: 2026 - protein, 11 aa, Artificial Sequence
  Synthetic
YRYDSRPPEDV

SEQ ID NO: 2027 - protein, 10 aa, Artificial Sequence
  Synthetic
YVDTYGDNAG

SEQ ID NO: 2028 - protein, 9 aa, Artificial Sequence
  Synthetic
SFSYFYPFR

SEQ ID NO: 2029 - protein, 8 aa, Artificial Sequence
  Synthetic
DIFIVSPR

SEQ ID NO: 2030 - protein, 37 aa, Artificial Sequence
  Synthetic
QDSRRSADALLRLQAMAGISEEQGSDTDTPIVYNDRN

SEQ ID NO: 2031 - protein, 10 aa, Artificial Sequence
  Synthetic
SAEALLRLQA

SEQ ID NO: 2032 - protein, 9 aa, Artificial Sequence
  Synthetic
RIVINREHL

SEQ ID NO: 2033 - protein, 5 aa, Artificial Sequence
  Synthetic
IPRFK

SEQ ID NO: 2034 - protein, 9 aa, Artificial Sequence
  Synthetic
AAALSPMEI

SEQ ID NO: 2035 - protein, 10 aa, Artificial Sequence
  Synthetic
AAASVVGAPV

SEQ ID NO: 2036 - protein, 9 aa, Artificial Sequence
  Synthetic
AALGRQDSI

SEQ ID NO: 2037 - protein, 10 aa, Artificial Sequence
  Synthetic
AAQRLVHAIA

SEQ ID NO: 2038 - protein, 8 aa, Artificial Sequence
  Synthetic
AAVEAAEL

SEQ ID NO: 2039 - protein, 9 aa, Artificial Sequence
  Synthetic
AGANVLNGL

SEQ ID NO: 2040 - protein, 8 aa, Artificial Sequence
  Synthetic
AGYANAAD

SEQ ID NO: 2041 - protein, 10 aa, Artificial Sequence
  Synthetic
AGYEQFEFRV

SEQ ID NO: 2042 - protein, 9 aa, Artificial Sequence
  Synthetic
AITGNADNL

SEQ ID NO: 2043 - protein, 9 aa, Artificial Sequence
  Synthetic
AKEKNATLM

SEQ ID NO: 2044 - protein, 8 aa, Artificial Sequence
  Synthetic
AKGVFLSL

SEQ ID NO: 2045 - protein, 9 aa, Artificial Sequence
  Synthetic
APHEYGFGI

SEQ ID NO: 2046 - protein, 9 aa, Artificial Sequence
  Synthetic
ARQGNDLEI

SEQ ID NO: 2047 - protein, 8 aa, Artificial Sequence
  Synthetic
ASVVGAPV

SEQ ID NO: 2048 - protein, 8 aa, Artificial Sequence
  Synthetic
ATLMFRLV

SEQ ID NO: 2049 - protein, 8 aa, Artificial Sequence
  Synthetic
AVAAAQRL

SEQ ID NO: 2050 - protein, 10 aa, Artificial Sequence
  Synthetic
DAGANVLNGL

SEQ ID NO: 2051 - protein, 9 aa, Artificial Sequence
  Synthetic
DALLAQLYR

SEQ ID NO: 2052 - protein, 10 aa, Artificial Sequence
  Synthetic
DANGVLKHSI

SEQ ID NO: 2053 - protein, 9 aa, Artificial Sequence
  Synthetic
DGDMNIGVI

SEQ ID NO: 2054 - protein, 9 aa, Artificial Sequence
  Synthetic
DHVKNIENL

SEQ ID NO: 2055 - protein, 8 aa, Artificial Sequence
  Synthetic
DIDMFAIM

SEQ ID NO: 2056 - protein, 9 aa, Artificial Sequence
  Synthetic
DMFAIMPHL

SEQ ID NO: 2057 - protein, 9 aa, Artificial Sequence
  Synthetic
DNVRNVENV

SEQ ID NO: 2058 - protein, 10 aa, Artificial Sequence
  Synthetic
DNVRNVENVI

SEQ ID NO: 2059 - protein, 8 aa, Artificial Sequence
  Synthetic
DTVDYSAM

SEQ ID NO: 2060 - protein, 9 aa, Artificial Sequence
  Synthetic
DTVDYSAMI

SEQ ID NO: 2061 - protein, 8 aa, Artificial Sequence
  Synthetic
DYLRQAGL

SEQ ID NO: 2062 - protein, 9 aa, Artificial Sequence
  Synthetic
DYYDNVRNV

SEQ ID NO: 2063 - protein, 8 aa, Artificial Sequence
  Synthetic
EFTTFVEI

SEQ ID NO: 2064 - protein, 9 aa, Artificial Sequence
  Synthetic
EFTTFVEIV

SEQ ID NO: 2065 - protein, 8 aa, Artificial Sequence
  Synthetic
EGYVFYEN

SEQ ID NO: 2066 - protein, 8 aa, Artificial Sequence
  Synthetic
ENVQYRHV

SEQ ID NO: 2067 - protein, 9 aa, Artificial Sequence
  Synthetic
EQLANSDGL

SEQ ID NO: 2068 - protein, 10 aa, Artificial Sequence
  Synthetic
FGVGYGHDTI

SEQ ID NO: 2069 - protein, 10 aa, Artificial Sequence
  Synthetic
FSPDVLETVP

SEQ ID NO: 2070 - protein, 9 aa, Artificial Sequence
  Synthetic
FSVDHVKNI

SEQ ID NO: 2071 - protein, 9 aa, Artificial Sequence
  Synthetic
GDDTYLFGV

SEQ ID NO: 2072 - protein, 9 aa, Artificial Sequence
  Synthetic
GDDVFLQDL

SEQ ID NO: 2073 - protein, 9 aa, Artificial Sequence
  Synthetic
GEDGNDIFL

SEQ ID NO: 2074 - protein, 10 aa, Artificial Sequence
  Synthetic
GERFNVRKQL

SEQ ID NO: 2075 - protein, 9 aa, Artificial Sequence
  Synthetic
GGAGNDTLV

SEQ ID NO: 2076 - protein, 8 aa, Artificial Sequence
  Synthetic
GGDDFEAV

SEQ ID NO: 2077 - protein, 9 aa, Artificial Sequence
  Synthetic
GKSEFTTFV

SEQ ID NO: 2078 - protein, 9 aa, Artificial Sequence
  Synthetic
GKSLFDDGL

SEQ ID NO: 2079 - protein, 9 aa, Artificial Sequence
  Synthetic
GNADNLKSV

SEQ ID NO: 2080 - protein, 9 aa, Artificial Sequence
  Synthetic
GQLVEVDTL

SEQ ID NO: 2081 - protein, 9 aa, Artificial Sequence
  Synthetic
GRSKFSPDV

SEQ ID NO: 2082 - protein, 8 aa, Artificial Sequence
  Synthetic
GSSAYDTV

SEQ ID NO: 2083 - protein, 9 aa, Artificial Sequence
  Synthetic
GTVEKWPAL

SEQ ID NO: 2084 - protein, 8 aa, Artificial Sequence
  Synthetic
GVDYYDNV

SEQ ID NO: 2085 - protein, 9 aa, Artificial Sequence
  Synthetic
GYEQFEFRV

SEQ ID NO: 2086 - protein, 9 aa, Artificial Sequence
  Synthetic
HAVGAQDVV

SEQ ID NO: 2087 - protein, 10 aa, Artificial Sequence
  Synthetic
IAAGRIGLGI

SEQ ID NO: 2088 - protein, 9 aa, Artificial Sequence
  Synthetic
IGDAQANTL

SEQ ID NO: 2089 - protein, 9 aa, Artificial Sequence
  Synthetic
IGLGILADL

SEQ ID NO: 2090 - protein, 9 aa, Artificial Sequence
  Synthetic
IGNAAGIPL

SEQ ID NO: 2091 - protein, 9 aa, Artificial Sequence
  Synthetic
IGTSMKDVL

SEQ ID NO: 2092 - protein, 9 aa, Artificial Sequence
  Synthetic
IGVITDFEL

SEQ ID NO: 2093 - protein, 9 aa, Artificial Sequence
  Synthetic
IPLTADIDM

SEQ ID NO: 2094 - protein, 8 aa, Artificial Sequence
  Synthetic
ISKSALEL

SEQ ID NO: 2095 - protein, 8 aa, Artificial Sequence
  Synthetic
ITGNADNL

SEQ ID NO: 2096 - protein, 8 aa, Artificial Sequence
  Synthetic
KIFVVSAT

SEQ ID NO: 2097 - protein, 10 aa, Artificial Sequence
  Synthetic
KQLNNANVYR

SEQ ID NO: 2098 - protein, 9 aa, Artificial Sequence
  Synthetic
KVIGNAAGI

SEQ ID NO: 2099 - protein, 8 aa, Artificial Sequence
  Synthetic
LAKVVSQL

SEQ ID NO: 2100 - protein, 9 aa, Artificial Sequence
  Synthetic
LANDYARKI

SEQ ID NO: 2101 - protein, 9 aa, Artificial Sequence
  Synthetic
LDYLRQAGL

SEQ ID NO: 2102 - protein, 8 aa, Artificial Sequence
  Synthetic
LGKGFASL

SEQ ID NO: 2103 - protein, 9 aa, Artificial Sequence
  Synthetic
LGKGFASLM

SEQ ID NO: 2104 - protein, 8 aa, Artificial Sequence
  Synthetic
LGVDYYDN

SEQ ID NO: 2105 - protein, 9 aa, Artificial Sequence
  Synthetic
LGVDYYDNV

SEQ ID NO: 2106 - protein, 10 aa, Artificial Sequence
  Synthetic
LKHSIKLDVI

SEQ ID NO: 2107 - protein, 8 aa, Artificial Sequence
  Synthetic
LQAGYIPV

SEQ ID NO: 2108 - protein, 9 aa, Artificial Sequence
  Synthetic
LQLTGGTVE

SEQ ID NO: 2109 - protein, 8 aa, Artificial Sequence
  Synthetic
LSAAVFGL

SEQ ID NO: 2110 - protein, 10 aa, Artificial Sequence
  Synthetic
LSLGKGFASL

SEQ ID NO: 2111 - protein, 9 aa, Artificial Sequence
  Synthetic
LSPMEIYGL

SEQ ID NO: 2112 - protein, 10 aa, Artificial Sequence
  Synthetic
NAHDNFLAGG

SEQ ID NO: 2113 - protein, 9 aa, Artificial Sequence
  Synthetic
NANVYREGV

SEQ ID NO: 2114 - protein, 8 aa, Artificial Sequence
  Synthetic
NDTLYGGL

SEQ ID NO: 2115 - protein, 9 aa, Artificial Sequence
  Synthetic
NGLAGNDVL

SEQ ID NO: 2116 - protein, 10 aa, Artificial Sequence
  Synthetic
NNANVYREGV

SEQ ID NO: 2117 - protein, 8 aa, Artificial Sequence
  Synthetic
NTVSYAAL

SEQ ID NO: 2118 - protein, 10 aa, Artificial Sequence
  Synthetic
NVLRNIENAV

SEQ ID NO: 2119 - protein, 9 aa, Artificial Sequence
  Synthetic
PALTFITPL

SEQ ID NO: 2120 - protein, 10 aa, Artificial Sequence
  Synthetic
PETSNVLRNI

SEQ ID NO: 2121 - protein, 8 aa, Artificial Sequence
  Synthetic
PMEIYGLV

SEQ ID NO: 2122 - protein, 9 aa, Artificial Sequence
  Synthetic
PQAYFEKNL

SEQ ID NO: 2123 - protein, 9 aa, Artificial Sequence
  Synthetic
PVNPNLSKL

SEQ ID NO: 2124 - protein, 9 aa, Artificial Sequence
  Synthetic
QAGWNASSV

SEQ ID NO: 2125 - protein, 10 aa, Artificial Sequence
  Synthetic
QAGWNASSVI

SEQ ID NO: 2126 - protein, 9 aa, Artificial Sequence
  Synthetic
QDAANAGNL

SEQ ID NO: 2127 - protein, 10 aa, Artificial Sequence
  Synthetic
QDAANAGNLL

SEQ ID NO: 2128 - protein, 8 aa, Artificial Sequence
  Synthetic
QDSGYDSL

SEQ ID NO: 2129 - protein, 9 aa, Artificial Sequence
  Synthetic
QQSHYADQL

SEQ ID NO: 2130 - protein, 9 aa, Artificial Sequence
  Synthetic
RALQGAQAV

SEQ ID NO: 2131 - protein, 9 aa, Artificial Sequence
  Synthetic
RGGLGLDTL

SEQ ID NO: 2132 - protein, 9 aa, Artificial Sequence
  Synthetic
RKQLNNANV

SEQ ID NO: 2133 - protein, 9 aa, Artificial Sequence
  Synthetic
RQDSGYDSL

SEQ ID NO: 2134 - protein, 9 aa, Artificial Sequence
  Synthetic
RQFRYDGDM

SEQ ID NO: 2135 - protein, 9 aa, Artificial Sequence
  Synthetic
RSKFSPDVL

SEQ ID NO: 2136 - protein, 9 aa, Artificial Sequence
  Synthetic
SAGAAAGAL

SEQ ID NO: 2137 - protein, 9 aa, Artificial Sequence
  Synthetic
SAHWGQRAL

SEQ ID NO: 2138 - protein, 9 aa, Artificial Sequence
  Synthetic
SAMIHPGRI

SEQ ID NO: 2139 - protein, 10 aa, Artificial Sequence
  Synthetic
SAMIHPGRIV

SEQ ID NO: 2140 - protein, 9 aa, Artificial Sequence
  Synthetic
SAYDTVSGI

SEQ ID NO: 2141 - protein, 8 aa, Artificial Sequence
  Synthetic
SAYGYEGD

SEQ ID NO: 2142 - protein, 9 aa, Artificial Sequence
  Synthetic
SGGAGDDVL

SEQ ID NO: 2143 - protein, 8 aa, Artificial Sequence
  Synthetic
SGLQVAGA

SEQ ID NO: 2144 - protein, 9 aa, Artificial Sequence
  Synthetic
SGYDSLDGV

SEQ ID NO: 2145 - protein, 10 aa, Artificial Sequence
  Synthetic
SLLTGALNGI

SEQ ID NO: 2146 - protein, 8 aa, Artificial Sequence
  Synthetic
SPMEIYGL

SEQ ID NO: 2147 - protein, 9 aa, Artificial Sequence
  Synthetic
SQMLTRGQL

SEQ ID NO: 2148 - protein, 10 aa, Artificial Sequence
  Synthetic
SSAYDTVSGI

SEQ ID NO: 2149 - protein, 9 aa, Artificial Sequence
  Synthetic
SSLAHGHTA

SEQ ID NO: 2150 - protein, 9 aa, Artificial Sequence
  Synthetic
SSVTSGDSV

SEQ ID NO: 2151 - protein, 10 aa, Artificial Sequence
  Synthetic
SVIGVQTTEI

SEQ ID NO: 2152 - protein, 9 aa, Artificial Sequence
  Synthetic
TNTVSYAAL

SEQ ID NO: 2153 - protein, 8 aa, Artificial Sequence
  Synthetic
TSLIAEGV

SEQ ID NO: 2154 - protein, 8 aa, Artificial Sequence
  Synthetic
TSLLTGAL

SEQ ID NO: 2155 - protein, 8 aa, Artificial Sequence
  Synthetic
TVPASPGL

SEQ ID NO: 2156 - protein, 9 aa, Artificial Sequence
  Synthetic
VAKEKNATL

SEQ ID NO: 2157 - protein, 10 aa, Artificial Sequence
  Synthetic
VAPHEYGFGI

SEQ ID NO: 2158 - protein, 8 aa, Artificial Sequence
  Synthetic
VAVVTSLL

SEQ ID NO: 2159 - protein, 9 aa, Artificial Sequence
  Synthetic
VFYENRAYG

SEQ ID NO: 2160 - protein, 10 aa, Artificial Sequence
  Synthetic
VFYENRAYGV

SEQ ID NO: 2161 - protein, 9 aa, Artificial Sequence
  Synthetic
VITDFELEV

SEQ ID NO: 2162 - protein, 8 aa, Artificial Sequence
  Synthetic
VNPHSTSL

SEQ ID NO: 2163 - protein, 9 aa, Artificial Sequence
  Synthetic
VNPHSTSLI

SEQ ID NO: 2164 - protein, 8 aa, Artificial Sequence
  Synthetic
VNPNLSKL

SEQ ID NO: 2165 - protein, 9 aa, Artificial Sequence
  Synthetic
VNPNLSKLF

SEQ ID NO: 2166 - protein, 9 aa, Artificial Sequence
  Synthetic
VQQPIIEKL

SEQ ID NO: 2167 - protein, 8 aa, Artificial Sequence
  Synthetic
VQYRHVEL

SEQ ID NO: 2168 - protein, 9 aa, Artificial Sequence
  Synthetic
VSIAAAASV

SEQ ID NO: 2169 - protein, 10 aa, Artificial Sequence
  Synthetic
VSIAAAASVV

SEQ ID NO: 2170 - protein, 9 aa, Artificial Sequence
  Synthetic
VTSLLTGAL

SEQ ID NO: 2171 - protein, 9 aa, Artificial Sequence
  Synthetic
VVLANASRI

SEQ ID NO: 2172 - protein, 9 aa, Artificial Sequence
  Synthetic
WPALNLFSV

SEQ ID NO: 2173 - protein, 8 aa, Artificial Sequence
  Synthetic
WVRKASAL

SEQ ID NO: 2174 - protein, 10 aa, Artificial Sequence
  Synthetic
YAVQYRRKGG

SEQ ID NO: 2175 - protein, 9 aa, Artificial Sequence
  Synthetic
YGGLGDDTL

SEQ ID NO: 2176 - protein, 10 aa, Artificial Sequence
  Synthetic
YGLVQQSHYA

SEQ ID NO: 2177 - protein, 9 aa, Artificial Sequence
  Synthetic
YGYEGDALL

SEQ ID NO: 2178 - protein, 8 aa, Artificial Sequence
  Synthetic
YIPVNPNL

SEQ ID NO: 2179 - protein, 10 aa, Artificial Sequence
  Synthetic
YSAMIHPGRI

SEQ ID NO: 2180 - protein, 10 aa, Artificial Sequence
  Synthetic
YSQTGAHAGI

SEQ ID NO: 2181 - protein, 20 aa, Artificial Sequence
  Synthetic
AYNFVESIINLFQVVHNSYN

SEQ ID NO: 2182 - protein, 6 aa, Artificial Sequence
  Synthetic
SGTTIK

SEQ ID NO: 2183 - protein, 15 aa, Artificial Sequence
  Synthetic
RGHTLESAEGRKIFG

SEQ ID NO: 2184 - protein, 22 aa, Artificial Sequence
  Synthetic
AGAMTVRDVAAAADLALQAGDA

SEQ ID NO: 2185 - protein, 23 aa, Artificial Sequence
  Synthetic
AGAMTVRDVAAAADLALQAGDAL

SEQ ID NO: 2186 - protein, 30 aa, Artificial Sequence
  Synthetic
ALAAVLVNPHIFTRIGAAQTSLADGAAGPA

SEQ ID NO: 2187 - protein, 12 aa, Artificial Sequence
  Synthetic
ALSIDSMTALGA

SEQ ID NO: 2188 - protein, 15 aa, Artificial Sequence
  Synthetic
DLSAARGADISGEGR

SEQ ID NO: 2189 - protein, 12 aa, Artificial Sequence
  Synthetic
DQNRYEYIWGLY

SEQ ID NO: 2190 - protein, 12 aa, Artificial Sequence
  Synthetic
DYTVSADAIALA

SEQ ID NO: 2191 - protein, 16 aa, Artificial Sequence
  Synthetic
GPIVVEAGELVSHAGG

SEQ ID NO: 2192 - protein, 23 aa, Artificial Sequence
  Synthetic
GRPEGLKIGAHSATSVSGSFDAL

SEQ ID NO: 2193 - protein, 19 aa, Artificial Sequence
  Synthetic
ITVTSRGGFDNEGKMESNK

SEQ ID NO: 2194 - protein, 14 aa, Artificial Sequence
  Synthetic
LDQNRYEYIWGLYP

SEQ ID NO: 2195 - protein, 11 aa, Artificial Sequence
  Synthetic
LSAARGADISG

SEQ ID NO: 2196 - protein, 10 aa, Artificial Sequence
  Synthetic
NKIRLMGPLQ

SEQ ID NO: 2197 - protein, 12 aa, Artificial Sequence
  Synthetic
NKLGRIRAGEDM

SEQ ID NO: 2198 - protein, 20 aa, Artificial Sequence
  Synthetic
NKLGRIRAGEDMHLDAPRIE

SEQ ID NO: 2199 - protein, 12 aa, Artificial Sequence
  Synthetic
PHLRNTGQVVAG

SEQ ID NO: 2200 - protein, 17 aa, Artificial Sequence
  Synthetic
QVDLHDLSAARGADISG

SEQ ID NO: 2201 - protein, 12 aa, Artificial Sequence
  Synthetic
RDVAAAADLALQ

SEQ ID NO: 2202 - protein, 12 aa, Artificial Sequence
  Synthetic
SAARGADISGEG

SEQ ID NO: 2203 - protein, 15 aa, Artificial Sequence
  Synthetic
TKGEMQIAGKGGGSP

SEQ ID NO: 2204 - protein, 12 aa, Artificial Sequence
  Synthetic
TVSADAIALAAQ

SEQ ID NO: 2205 - protein, 9 aa, Artificial Sequence
  Synthetic
VVAGHDIHI

SEQ ID NO: 2206 - protein, 24 aa, Artificial Sequence
  Synthetic
PSGPNHTKVVQLPKISKNALKANG

SEQ ID NO: 2207 - protein, 41 aa, Artificial Sequence
  Synthetic
LVGATPERPRLRLVDADDPLLRTAPGPGEVWVTPVIGSQAR

SEQ ID NO: 2208 - protein, 27 aa, Artificial Sequence
  Synthetic
QQSRWGLGSPNCHGPDWASPVCQRHSP

SEQ ID NO: 2209 - protein, 17 aa, Artificial Sequence
  Synthetic
AGEAMVLVYYESIAYSF

SEQ ID NO: 2210 - protein, 24 aa, Artificial Sequence
  Synthetic
GGVGLASTLWYAESNALSKRLGEL

SEQ ID NO: 2211 - protein, 18 aa, Artificial Sequence
  Synthetic
GTLVRIAPVIGACMARQA

SEQ ID NO: 2212 - protein, 18 aa, Artificial Sequence
  Synthetic
IRRVTRVYHNGITGETTT

SEQ ID NO: 2213 - protein, 18 aa, Artificial Sequence
  Synthetic
IVKTGERQHGIHIQGSDP

SEQ ID NO: 2214 - protein, 24 aa, Artificial Sequence
  Synthetic
IVKTGERQHGIHIQGSDPGGVRTA

SEQ ID NO: 2215 - protein, 24 aa, Artificial Sequence
  Synthetic
LRDTNVTAVPASGAPAAVSVLGAS

SEQ ID NO: 2216 - protein, 24 aa, Artificial Sequence
  Synthetic
PEAPAPQPPAGRELSAAANAAVNT

SEQ ID NO: 2217 - protein, 9 aa, Artificial Sequence
  Synthetic
AAADFAHAE

SEQ ID NO: 2218 - protein, 9 aa, Artificial Sequence
  Synthetic
AAAEVAGAL

SEQ ID NO: 2219 - protein, 9 aa, Artificial Sequence
  Synthetic
AAESTFESY

SEQ ID NO: 2220 - protein, 9 aa, Artificial Sequence
  Synthetic
AAGFDPEVQ

SEQ ID NO: 2221 - protein, 9 aa, Artificial Sequence
  Synthetic
AALGRGHSL

SEQ ID NO: 2222 - protein, 9 aa, Artificial Sequence
  Synthetic
AAMQGAVVH

SEQ ID NO: 2223 - protein, 9 aa, Artificial Sequence
  Synthetic
AAPAAHADW

SEQ ID NO: 2224 - protein, 9 aa, Artificial Sequence
  Synthetic
AAQATVVQR

SEQ ID NO: 2225 - protein, 9 aa, Artificial Sequence
  Synthetic
AARVAGDNY

SEQ ID NO: 2226 - protein, 9 aa, Artificial Sequence
  Synthetic
AAVALLNKL

SEQ ID NO: 2227 - protein, 9 aa, Artificial Sequence
  Synthetic
ADDPPATVY

SEQ ID NO: 2228 - protein, 9 aa, Artificial Sequence
  Synthetic
AEAGRFKVL

SEQ ID NO: 2229 - protein, 9 aa, Artificial Sequence
  Synthetic
AEATQLVTA

SEQ ID NO: 2230 - protein, 9 aa, Artificial Sequence
  Synthetic
AEGGATLGA

SEQ ID NO: 2231 - protein, 9 aa, Artificial Sequence
  Synthetic
AEHGEVSIQ

SEQ ID NO: 2232 - protein, 9 aa, Artificial Sequence
  Synthetic
AEIAFYPKE

SEQ ID NO: 2233 - protein, 9 aa, Artificial Sequence
  Synthetic
AEKVTTPAV

SEQ ID NO: 2234 - protein, 9 aa, Artificial Sequence
  Synthetic
AELQTYLRQ

SEQ ID NO: 2235 - protein, 9 aa, Artificial Sequence
  Synthetic
AEQSLIEVG

SEQ ID NO: 2236 - protein, 9 aa, Artificial Sequence
  Synthetic
AESNALSKR

SEQ ID NO: 2237 - protein, 9 aa, Artificial Sequence
  Synthetic
AESSEAMAA

SEQ ID NO: 2238 - protein, 9 aa, Artificial Sequence
  Synthetic
AEVKVGYRA

SEQ ID NO: 2239 - protein, 9 aa, Artificial Sequence
  Synthetic
AEVTDTSPS

SEQ ID NO: 2240 - protein, 9 aa, Artificial Sequence
  Synthetic
AGKSLKKKN

SEQ ID NO: 2241 - protein, 9 aa, Artificial Sequence
  Synthetic
AGLAGPSAV

SEQ ID NO: 2242 - protein, 9 aa, Artificial Sequence
  Synthetic
AIRVGRGAR

SEQ ID NO: 2243 - protein, 9 aa, Artificial Sequence
  Synthetic
ALAAIASAA

SEQ ID NO: 2244 - protein, 9 aa, Artificial Sequence
  Synthetic
ALADVPYVL

SEQ ID NO: 2245 - protein, 9 aa, Artificial Sequence
  Synthetic
ALANDGTIV

SEQ ID NO: 2246 - protein, 9 aa, Artificial Sequence
  Synthetic
ALGRGHSLY

SEQ ID NO: 2247 - protein, 9 aa, Artificial Sequence
  Synthetic
ALILAASPV

SEQ ID NO: 2248 - protein, 9 aa, Artificial Sequence
  Synthetic
ALMLACTGL

SEQ ID NO: 2249 - protein, 9 aa, Artificial Sequence
  Synthetic
AMQGAVVHL

SEQ ID NO: 2250 - protein, 9 aa, Artificial Sequence
  Synthetic
AMTHLSPAL

SEQ ID NO: 2251 - protein, 9 aa, Artificial Sequence
  Synthetic
AMYGKHITL

SEQ ID NO: 2252 - protein, 9 aa, Artificial Sequence
  Synthetic
ANEANALLW

SEQ ID NO: 2253 - protein, 9 aa, Artificial Sequence
  Synthetic
APLSITLQA

SEQ ID NO: 2254 - protein, 9 aa, Artificial Sequence
  Synthetic
APNALAWAL

SEQ ID NO: 2255 - protein, 9 aa, Artificial Sequence
  Synthetic
APPAPKPAP

SEQ ID NO: 2256 - protein, 9 aa, Artificial Sequence
  Synthetic
APPGAGFIY

SEQ ID NO: 2257 - protein, 9 aa, Artificial Sequence
  Synthetic
APQAAPLSI

SEQ ID NO: 2258 - protein, 9 aa, Artificial Sequence
  Synthetic
APRIENTAK

SEQ ID NO: 2259 - protein, 9 aa, Artificial Sequence
  Synthetic
AQGKALLYR

SEQ ID NO: 2260 - protein, 9 aa, Artificial Sequence
  Synthetic
AQITSYVGF

SEQ ID NO: 2261 - protein, 9 aa, Artificial Sequence
  Synthetic
AQLEVRGQR

SEQ ID NO: 2262 - protein, 9 aa, Artificial Sequence
  Synthetic
AQQLKQADR

SEQ ID NO: 2263 - protein, 9 aa, Artificial Sequence
  Synthetic
AQVTVAGRY

SEQ ID NO: 2264 - protein, 9 aa, Artificial Sequence
  Synthetic
ARRSRVRAL

SEQ ID NO: 2265 - protein, 9 aa, Artificial Sequence
  Synthetic
ASPRRARRA

SEQ ID NO: 2266 - protein, 9 aa, Artificial Sequence
  Synthetic
ASSPDAHVP

SEQ ID NO: 2267 - protein, 9 aa, Artificial Sequence
  Synthetic
ASVSNPGTF

SEQ ID NO: 2268 - protein, 9 aa, Artificial Sequence
  Synthetic
ATWNFQSTY

SEQ ID NO: 2269 - protein, 9 aa, Artificial Sequence
  Synthetic
ATYIADSGF

SEQ ID NO: 2270 - protein, 9 aa, Artificial Sequence
  Synthetic
AVAAPAVGA

SEQ ID NO: 2271 - protein, 9 aa, Artificial Sequence
  Synthetic
AVFMQQRPL

SEQ ID NO: 2272 - protein, 9 aa, Artificial Sequence
  Synthetic
AVLVNPHIF

SEQ ID NO: 2273 - protein, 9 aa, Artificial Sequence
  Synthetic
CFGKDLKRP

SEQ ID NO: 2274 - protein, 9 aa, Artificial Sequence
  Synthetic
CPSSLGNGV

SEQ ID NO: 2275 - protein, 9 aa, Artificial Sequence
  Synthetic
DAGHEHDTW

SEQ ID NO: 2276 - protein, 9 aa, Artificial Sequence
  Synthetic
DAKHDLTVT

SEQ ID NO: 2277 - protein, 9 aa, Artificial Sequence
  Synthetic
DASGQHRLW

SEQ ID NO: 2278 - protein, 9 aa, Artificial Sequence
  Synthetic
DATFETYAL

SEQ ID NO: 2279 - protein, 9 aa, Artificial Sequence
  Synthetic
DATFQTYAL

SEQ ID NO: 2280 - protein, 9 aa, Artificial Sequence
  Synthetic
DATLVGAKF

SEQ ID NO: 2281 - protein, 9 aa, Artificial Sequence
  Synthetic
DDEVDVSGR

SEQ ID NO: 2282 - protein, 9 aa, Artificial Sequence
  Synthetic
DENGKPQTY

SEQ ID NO: 2283 - protein, 9 aa, Artificial Sequence
  Synthetic
DGPPSRPTT

SEQ ID NO: 2284 - protein, 9 aa, Artificial Sequence
  Synthetic
DHLTGRSCQ

SEQ ID NO: 2285 - protein, 9 aa, Artificial Sequence
  Synthetic
DNEGKMESN

SEQ ID NO: 2286 - protein, 9 aa, Artificial Sequence
  Synthetic
DPPATVYRY

SEQ ID NO: 2287 - protein, 9 aa, Artificial Sequence
  Synthetic
EATEGDATL

SEQ ID NO: 2288 - protein, 9 aa, Artificial Sequence
  Synthetic
EATQQAAGF

SEQ ID NO: 2289 - protein, 9 aa, Artificial Sequence
  Synthetic
ECSGKQDCP

SEQ ID NO: 2290 - protein, 9 aa, Artificial Sequence
  Synthetic
EGGKLRGKD

SEQ ID NO: 2291 - protein, 9 aa, Artificial Sequence
  Synthetic
EGKMESNKD

SEQ ID NO: 2292 - protein, 9 aa, Artificial Sequence
  Synthetic
EHRMQEAVE

SEQ ID NO: 2293 - protein, 9 aa, Artificial Sequence
  Synthetic
EKRLDIDDA

SEQ ID NO: 2294 - protein, 9 aa, Artificial Sequence
  Synthetic
EPASANTLL

SEQ ID NO: 2295 - protein, 9 aa, Artificial Sequence
  Synthetic
EPQAELAVF

SEQ ID NO: 2296 - protein, 9 aa, Artificial Sequence
  Synthetic
EPVKLTLTG

SEQ ID NO: 2297 - protein, 9 aa, Artificial Sequence
  Synthetic
ESAEGRKIF

SEQ ID NO: 2298 - protein, 9 aa, Artificial Sequence
  Synthetic
ESYSESHNF

SEQ ID NO: 2299 - protein, 9 aa, Artificial Sequence
  Synthetic
ETFCITTIY

SEQ ID NO: 2300 - protein, 9 aa, Artificial Sequence
  Synthetic
EVAGALELS

SEQ ID NO: 2301 - protein, 9 aa, Artificial Sequence
  Synthetic
EVAKVEVVP

SEQ ID NO: 2302 - protein, 9 aa, Artificial Sequence
  Synthetic
EVDGIIQEF

SEQ ID NO: 2303 - protein, 9 aa, Artificial Sequence
  Synthetic
EVRADNNFY

SEQ ID NO: 2304 - protein, 9 aa, Artificial Sequence
  Synthetic
FAILSSTTE

SEQ ID NO: 2305 - protein, 9 aa, Artificial Sequence
  Synthetic
FAISAYALK

SEQ ID NO: 2306 - protein, 9 aa, Artificial Sequence
  Synthetic
FALYDGTYL

SEQ ID NO: 2307 - protein, 9 aa, Artificial Sequence
  Synthetic
FDTMLGFAI

SEQ ID NO: 2308 - protein, 9 aa, Artificial Sequence
  Synthetic
FEGKPALEL

SEQ ID NO: 2309 - protein, 9 aa, Artificial Sequence
  Synthetic
FELGADHAV

SEQ ID NO: 2310 - protein, 9 aa, Artificial Sequence
  Synthetic
FEPGITTNY

SEQ ID NO: 2311 - protein, 9 aa, Artificial Sequence
  Synthetic
FETYALTGI

SEQ ID NO: 2312 - protein, 9 aa, Artificial Sequence
  Synthetic
FIYRETFCI

SEQ ID NO: 2313 - protein, 9 aa, Artificial Sequence
  Synthetic
FPTRTTAPG

SEQ ID NO: 2314 - protein, 9 aa, Artificial Sequence
  Synthetic
FQTYALTGI

SEQ ID NO: 2315 - protein, 9 aa, Artificial Sequence
  Synthetic
FTHADGWFL

SEQ ID NO: 2316 - protein, 9 aa, Artificial Sequence
  Synthetic
FVRDGQSVI

SEQ ID NO: 2317 - protein, 9 aa, Artificial Sequence
  Synthetic
FVRSGQPVI

SEQ ID NO: 2318 - protein, 9 aa, Artificial Sequence
  Synthetic
FVWYVDTVI

SEQ ID NO: 2319 - protein, 9 aa, Artificial Sequence
  Synthetic
GAASSRQAL

SEQ ID NO: 2320 - protein, 9 aa, Artificial Sequence
  Synthetic
GAASSYFEY

SEQ ID NO: 2321 - protein, 9 aa, Artificial Sequence
  Synthetic
GAFDLKTTF

SEQ ID NO: 2322 - protein, 9 aa, Artificial Sequence
  Synthetic
GAPAAVSVL

SEQ ID NO: 2323 - protein, 9 aa, Artificial Sequence
  Synthetic
GATRAVDSL

SEQ ID NO: 2324 - protein, 9 aa, Artificial Sequence
  Synthetic
GAVPGGAVP

SEQ ID NO: 2325 - protein, 9 aa, Artificial Sequence
  Synthetic
GEAMVLVYY

SEQ ID NO: 2326 - protein, 9 aa, Artificial Sequence
  Synthetic
GEIALGDAT

SEQ ID NO: 2327 - protein, 9 aa, Artificial Sequence
  Synthetic
GELMAAQVA

SEQ ID NO: 2328 - protein, 9 aa, Artificial Sequence
  Synthetic
GGVPGGAVP

SEQ ID NO: 2329 - protein, 9 aa, Artificial Sequence
  Synthetic
GHEHDTWFD

SEQ ID NO: 2330 - protein, 9 aa, Artificial Sequence
  Synthetic
GIGALKAGA

SEQ ID NO: 2331 - protein, 9 aa, Artificial Sequence
  Synthetic
GIVIPPKAL

SEQ ID NO: 2332 - protein, 9 aa, Artificial Sequence
  Synthetic
GKDLKRPGS

SEQ ID NO: 2333 - protein, 9 aa, Artificial Sequence
  Synthetic
GKLPKPVTV

SEQ ID NO: 2334 - protein, 9 aa, Artificial Sequence
  Synthetic
GKSLKKKNQ

SEQ ID NO: 2335 - protein, 9 aa, Artificial Sequence
  Synthetic
GLDVQQGTV

SEQ ID NO: 2336 - protein, 9 aa, Artificial Sequence
  Synthetic
GLTDGVSRI

SEQ ID NO: 2337 - protein, 9 aa, Artificial Sequence
  Synthetic
GLYPTYTEW

SEQ ID NO: 2338 - protein, 9 aa, Artificial Sequence
  Synthetic
GLYQTYTEW

SEQ ID NO: 2339 - protein, 9 aa, Artificial Sequence
  Synthetic
GPPSRPTTP

SEQ ID NO: 2340 - protein, 9 aa, Artificial Sequence
  Synthetic
GPSAVAAPA

SEQ ID NO: 2341 - protein, 9 aa, Artificial Sequence
  Synthetic
GVAPTAQQL

SEQ ID NO: 2342 - protein, 9 aa, Artificial Sequence
  Synthetic
GVGLASTLW

SEQ ID NO: 2343 - protein, 9 aa, Artificial Sequence
  Synthetic
GYEAGFSLG

SEQ ID NO: 2344 - protein, 9 aa, Artificial Sequence
  Synthetic
HADDGTIVI

SEQ ID NO: 2345 - protein, 9 aa, Artificial Sequence
  Synthetic
HADWNNQSI

SEQ ID NO: 2346 - protein, 9 aa, Artificial Sequence
  Synthetic
HAEHEKDVR

SEQ ID NO: 2347 - protein, 9 aa, Artificial Sequence
  Synthetic
HANHYGTRI

SEQ ID NO: 2348 - protein, 9 aa, Artificial Sequence
  Synthetic
HAQGKALLY

SEQ ID NO: 2349 - protein, 9 aa, Artificial Sequence
  Synthetic
HFIGYIYEV

SEQ ID NO: 2350 - protein, 9 aa, Artificial Sequence
  Synthetic
HLSPALADV

SEQ ID NO: 2351 - protein, 9 aa, Artificial Sequence
  Synthetic
HSLYASYEY

SEQ ID NO: 2352 - protein, 9 aa, Artificial Sequence
  Synthetic
HVRGMLVPV

SEQ ID NO: 2353 - protein, 9 aa, Artificial Sequence
  Synthetic
HVSKEEQYY

SEQ ID NO: 2354 - protein, 9 aa, Artificial Sequence
  Synthetic
HVTRGWSIF

SEQ ID NO: 2355 - protein, 9 aa, Artificial Sequence
  Synthetic
IADSGFYLD

SEQ ID NO: 2356 - protein, 9 aa, Artificial Sequence
  Synthetic
IAHRTELRG

SEQ ID NO: 2357 - protein, 9 aa, Artificial Sequence
  Synthetic
IENTAKLSG

SEQ ID NO: 2358 - protein, 9 aa, Artificial Sequence
  Synthetic
IESKISQSV

SEQ ID NO: 2359 - protein, 9 aa, Artificial Sequence
  Synthetic
IETGGARRF

SEQ ID NO: 2360 - protein, 9 aa, Artificial Sequence
  Synthetic
IIKDAPPGA

SEQ ID NO: 2361 - protein, 9 aa, Artificial Sequence
  Synthetic
IIQEFAADL

SEQ ID NO: 2362 - protein, 9 aa, Artificial Sequence
  Synthetic
ILAGALATY

SEQ ID NO: 2363 - protein, 9 aa, Artificial Sequence
  Synthetic
ILLENPAAE

SEQ ID NO: 2364 - protein, 9 aa, Artificial Sequence
  Synthetic
ILPILVLAL

SEQ ID NO: 2365 - protein, 9 aa, Artificial Sequence
  Synthetic
IPFQRALRL

SEQ ID NO: 2366 - protein, 9 aa, Artificial Sequence
  Synthetic
ISVRVHVSK

SEQ ID NO: 2367 - protein, 9 aa, Artificial Sequence
  Synthetic
ITNETGKTY

SEQ ID NO: 2368 - protein, 9 aa, Artificial Sequence
  Synthetic
ITNKRAALI

SEQ ID NO: 2369 - protein, 9 aa, Artificial Sequence
  Synthetic
ITSYVGFSV

SEQ ID NO: 2370 - protein, 9 aa, Artificial Sequence
  Synthetic
ITVTSRGGF

SEQ ID NO: 2371 - protein, 9 aa, Artificial Sequence
  Synthetic
IVIPPKALF

SEQ ID NO: 2372 - protein, 9 aa, Artificial Sequence
  Synthetic
IVVEAGELV

SEQ ID NO: 2373 - protein, 9 aa, Artificial Sequence
  Synthetic
KAAKSVNLM

SEQ ID NO: 2374 - protein, 9 aa, Artificial Sequence
  Synthetic
KAAPLRRTT

SEQ ID NO: 2375 - protein, 9 aa, Artificial Sequence
  Synthetic
KAGKLSATG

SEQ ID NO: 2376 - protein, 9 aa, Artificial Sequence
  Synthetic
KAGTIAAPW

SEQ ID NO: 2377 - protein, 9 aa, Artificial Sequence
  Synthetic
KAKSLTTEI

SEQ ID NO: 2378 - protein, 9 aa, Artificial Sequence
  Synthetic
KATVTTVQV

SEQ ID NO: 2379 - protein, 9 aa, Artificial Sequence
  Synthetic
KDYRDKDGG

SEQ ID NO: 2380 - protein, 9 aa, Artificial Sequence
  Synthetic
KEAATIVAA

SEQ ID NO: 2381 - protein, 9 aa, Artificial Sequence
  Synthetic
KEDVDAAQI

SEQ ID NO: 2382 - protein, 9 aa, Artificial Sequence
  Synthetic
KEVDGIIQE

SEQ ID NO: 2383 - protein, 9 aa, Artificial Sequence
  Synthetic
KGPKLAMPW

SEQ ID NO: 2384 - protein, 9 aa, Artificial Sequence
  Synthetic
KLASGGGAV

SEQ ID NO: 2385 - protein, 9 aa, Artificial Sequence
  Synthetic
KLKGKNQEF

SEQ ID NO: 2386 - protein, 9 aa, Artificial Sequence
  Synthetic
KLLHHILPI

SEQ ID NO: 2387 - protein, 9 aa, Artificial Sequence
  Synthetic
KPAPQPGPQ

SEQ ID NO: 2388 - protein, 9 aa, Artificial Sequence
  Synthetic
KPAPTAPPM

SEQ ID NO: 2389 - protein, 9 aa, Artificial Sequence
  Synthetic
KPAVSVKVA

SEQ ID NO: 2390 - protein, 9 aa, Artificial Sequence
  Synthetic
KPDRAARVA

SEQ ID NO: 2391 - protein, 9 aa, Artificial Sequence
  Synthetic
KPLADIAVI

SEQ ID NO: 2392 - protein, 9 aa, Artificial Sequence
  Synthetic
KPLADIAVV

SEQ ID NO: 2393 - protein, 9 aa, Artificial Sequence
  Synthetic
KPLPKPLPV

SEQ ID NO: 2394 - protein, 9 aa, Artificial Sequence
  Synthetic
KQADRDFVW

SEQ ID NO: 2395 - protein, 9 aa, Artificial Sequence
  Synthetic
KSLPGGKLP

SEQ ID NO: 2396 - protein, 9 aa, Artificial Sequence
  Synthetic
KSYTLRYLA

SEQ ID NO: 2397 - protein, 9 aa, Artificial Sequence
  Synthetic
KTNMVVTSV

SEQ ID NO: 2398 - protein, 9 aa, Artificial Sequence
  Synthetic
KVLAPRLYL

SEQ ID NO: 2399 - protein, 9 aa, Artificial Sequence
  Synthetic
KVLSTKTTL

SEQ ID NO: 2400 - protein, 9 aa, Artificial Sequence
  Synthetic
LAAGAGLTL

SEQ ID NO: 2401 - protein, 9 aa, Artificial Sequence
  Synthetic
LAAIASAAH

SEQ ID NO: 2402 - protein, 9 aa, Artificial Sequence
  Synthetic
LAANGNGQW

SEQ ID NO: 2403 - protein, 9 aa, Artificial Sequence
  Synthetic
LAAQVTQRG

SEQ ID NO: 2404 - protein, 9 aa, Artificial Sequence
  Synthetic
LAARGDGAL

SEQ ID NO: 2405 - protein, 9 aa, Artificial Sequence
  Synthetic
LAAVLVNPH

SEQ ID NO: 2406 - protein, 9 aa, Artificial Sequence
  Synthetic
LAGSGLFRM

SEQ ID NO: 2407 - protein, 9 aa, Artificial Sequence
  Synthetic
LAKALSAAL

SEQ ID NO: 2408 - protein, 9 aa, Artificial Sequence
  Synthetic
LALQAGDAL

SEQ ID NO: 2409 - protein, 9 aa, Artificial Sequence
  Synthetic
LAMPWTFHA

SEQ ID NO: 2410 - protein, 9 aa, Artificial Sequence
  Synthetic
LANDGTIVI

SEQ ID NO: 2411 - protein, 9 aa, Artificial Sequence
  Synthetic
LAPTVGVAF

SEQ ID NO: 2412 - protein, 9 aa, Artificial Sequence
  Synthetic
LASDGSVDF

SEQ ID NO: 2413 - protein, 9 aa, Artificial Sequence
  Synthetic
LATYQSEYL

SEQ ID NO: 2414 - protein, 9 aa, Artificial Sequence
  Synthetic
LAWALMLAC

SEQ ID NO: 2415 - protein, 9 aa, Artificial Sequence
  Synthetic
LEAGRRFTH

SEQ ID NO: 2416 - protein, 9 aa, Artificial Sequence
  Synthetic
LFTQQGGAY

SEQ ID NO: 2417 - protein, 9 aa, Artificial Sequence
  Synthetic
LKRPGSSPM

SEQ ID NO: 2418 - protein, 9 aa, Artificial Sequence
  Synthetic
LLGSHVARA

SEQ ID NO: 2419 - protein, 9 aa, Artificial Sequence
  Synthetic
LLHHILPIL

SEQ ID NO: 2420 - protein, 9 aa, Artificial Sequence
  Synthetic
LLNAGGTLL

SEQ ID NO: 2421 - protein, 9 aa, Artificial Sequence
  Synthetic
LMGPLQVNA

SEQ ID NO: 2422 - protein, 9 aa, Artificial Sequence
  Synthetic
LNDSKITMG

SEQ ID NO: 2423 - protein, 9 aa, Artificial Sequence
  Synthetic
LPEPVKLTL

SEQ ID NO: 2424 - protein, 9 aa, Artificial Sequence
  Synthetic
LPILVLALL

SEQ ID NO: 2425 - protein, 9 aa, Artificial Sequence
  Synthetic
LPKISKNAL

SEQ ID NO: 2426 - protein, 9 aa, Artificial Sequence
  Synthetic
LPKPVTVKL

SEQ ID NO: 2427 - protein, 9 aa, Artificial Sequence
  Synthetic
LPLKANPMH

SEQ ID NO: 2428 - protein, 9 aa, Artificial Sequence
  Synthetic
LPPRPVVAE

SEQ ID NO: 2429 - protein, 9 aa, Artificial Sequence
  Synthetic
LPSIPGTSI

SEQ ID NO: 2430 - protein, 9 aa, Artificial Sequence
  Synthetic
LPTHLYKNF

SEQ ID NO: 2431 - protein, 9 aa, Artificial Sequence
  Synthetic
LPVRGVALV

SEQ ID NO: 2432 - protein, 9 aa, Artificial Sequence
  Synthetic
LPVSLTALD

SEQ ID NO: 2433 - protein, 9 aa, Artificial Sequence
  Synthetic
LQGGNKVPV

SEQ ID NO: 2434 - protein, 9 aa, Artificial Sequence
  Synthetic
LSAALGADW

SEQ ID NO: 2435 - protein, 9 aa, Artificial Sequence
  Synthetic
LSDAGHEHD

SEQ ID NO: 2436 - protein, 9 aa, Artificial Sequence
  Synthetic
LSGEVQRKG

SEQ ID NO: 2437 - protein, 9 aa, Artificial Sequence
  Synthetic
LSSPSAITV

SEQ ID NO: 2438 - protein, 9 aa, Artificial Sequence
  Synthetic
LTWLAILAV

SEQ ID NO: 2439 - protein, 9 aa, Artificial Sequence
  Synthetic
LVFSHVRGM

SEQ ID NO: 2440 - protein, 9 aa, Artificial Sequence
  Synthetic
LVSDAGADL

SEQ ID NO: 2441 - protein, 9 aa, Artificial Sequence
  Synthetic
LVYYESIAY

SEQ ID NO: 2442 - protein, 9 aa, Artificial Sequence
  Synthetic
MAAESTFES

SEQ ID NO: 2443 - protein, 9 aa, Artificial Sequence
  Synthetic
MAAGHDATL

SEQ ID NO: 2444 - protein, 9 aa, Artificial Sequence
  Synthetic
MAAWSERAG

SEQ ID NO: 2445 - protein, 9 aa, Artificial Sequence
  Synthetic
MALGALGAA

SEQ ID NO: 2446 - protein, 9 aa, Artificial Sequence
  Synthetic
MAPVMGACM

SEQ ID NO: 2447 - protein, 9 aa, Artificial Sequence
  Synthetic
MATKGEMQI

SEQ ID NO: 2448 - protein, 9 aa, Artificial Sequence
  Synthetic
MDAKGGTLL

SEQ ID NO: 2449 - protein, 9 aa, Artificial Sequence
  Synthetic
MESNKDIVI

SEQ ID NO: 2450 - protein, 9 aa, Artificial Sequence
  Synthetic
MEVMLRAVF

SEQ ID NO: 2451 - protein, 9 aa, Artificial Sequence
  Synthetic
MEYFKTPLP

SEQ ID NO: 2452 - protein, 9 aa, Artificial Sequence
  Synthetic
MHTIASILL

SEQ ID NO: 2453 - protein, 9 aa, Artificial Sequence
  Synthetic
MIYMSGLAV

SEQ ID NO: 2454 - protein, 9 aa, Artificial Sequence
  Synthetic
MLACTGLPL

SEQ ID NO: 2455 - protein, 9 aa, Artificial Sequence
  Synthetic
MPIDRKTLC

SEQ ID NO: 2456 - protein, 9 aa, Artificial Sequence
  Synthetic
MPKAPELDL

SEQ ID NO: 2457 - protein, 9 aa, Artificial Sequence
  Synthetic
MQRQAGLPL

SEQ ID NO: 2458 - protein, 9 aa, Artificial Sequence
  Synthetic
NALAWALML

SEQ ID NO: 2459 - protein, 9 aa, Artificial Sequence
  Synthetic
NITNKRAAL

SEQ ID NO: 2460 - protein, 9 aa, Artificial Sequence
  Synthetic
NLMAAESTF

SEQ ID NO: 2461 - protein, 9 aa, Artificial Sequence
  Synthetic
NNETMSGRQ

SEQ ID NO: 2462 - protein, 9 aa, Artificial Sequence
  Synthetic
NPGSLIAEV

SEQ ID NO: 2463 - protein, 9 aa, Artificial Sequence
  Synthetic
NPMHTIASI

SEQ ID NO: 2464 - protein, 9 aa, Artificial Sequence
  Synthetic
NPQTQLSNI

SEQ ID NO: 2465 - protein, 9 aa, Artificial Sequence
  Synthetic
NPYTSRRSV

SEQ ID NO: 2466 - protein, 9 aa, Artificial Sequence
  Synthetic
PAPTAPPMP

SEQ ID NO: 2467 - protein, 9 aa, Artificial Sequence
  Synthetic
PASANTLLL

SEQ ID NO: 2468 - protein, 9 aa, Artificial Sequence
  Synthetic
PAVALPRPL

SEQ ID NO: 2469 - protein, 9 aa, Artificial Sequence
  Synthetic
PDAHVPFCF

SEQ ID NO: 2470 - protein, 9 aa, Artificial Sequence
  Synthetic
PELGAAIRV

SEQ ID NO: 2471 - protein, 9 aa, Artificial Sequence
  Synthetic
PFIIKLKDC

SEQ ID NO: 2472 - protein, 9 aa, Artificial Sequence
  Synthetic
PGPQPPQPP

SEQ ID NO: 2473 - protein, 9 aa, Artificial Sequence
  Synthetic
PGPQPPQPQ

SEQ ID NO: 2474 - protein, 9 aa, Artificial Sequence
  Synthetic
PGPTTDYST

SEQ ID NO: 2475 - protein, 9 aa, Artificial Sequence
  Synthetic
PGTFTAGKD

SEQ ID NO: 2476 - protein, 9 aa, Artificial Sequence
  Synthetic
PGTPGDLLE

SEQ ID NO: 2477 - protein, 9 aa, Artificial Sequence
  Synthetic
PKPKPKAER

SEQ ID NO: 2478 - protein, 9 aa, Artificial Sequence
  Synthetic
PKPKPKPKA

SEQ ID NO: 2479 - protein, 9 aa, Artificial Sequence
  Synthetic
PKPKPKPKP

SEQ ID NO: 2480 - protein, 9 aa, Artificial Sequence
  Synthetic
PLPPRPVVA

SEQ ID NO: 2481 - protein, 9 aa, Artificial Sequence
  Synthetic
PPAPKPAPQ

SEQ ID NO: 2482 - protein, 9 aa, Artificial Sequence
  Synthetic
PPKPAPVAK

SEQ ID NO: 2483 - protein, 9 aa, Artificial Sequence
  Synthetic
PPRPVAAQV

SEQ ID NO: 2484 - protein, 9 aa, Artificial Sequence
  Synthetic
PPRPVVAEK

SEQ ID NO: 2485 - protein, 9 aa, Artificial Sequence
  Synthetic
PPSRPTTPP

SEQ ID NO: 2486 - protein, 9 aa, Artificial Sequence
  Synthetic
PRRARRALR

SEQ ID NO: 2487 - protein, 9 aa, Artificial Sequence
  Synthetic
QAAPLSITL

SEQ ID NO: 2488 - protein, 9 aa, Artificial Sequence
  Synthetic
QADRDFVWY

SEQ ID NO: 2489 - protein, 9 aa, Artificial Sequence
  Synthetic
QAIVVGKDL

SEQ ID NO: 2490 - protein, 9 aa, Artificial Sequence
  Synthetic
QALGALKLY

SEQ ID NO: 2491 - protein, 9 aa, Artificial Sequence
  Synthetic
QELALKLKG

SEQ ID NO: 2492 - protein, 9 aa, Artificial Sequence
  Synthetic
QITQHGGPY

SEQ ID NO: 2493 - protein, 9 aa, Artificial Sequence
  Synthetic
QITQHGSPY

SEQ ID NO: 2494 - protein, 9 aa, Artificial Sequence
  Synthetic
QPLPPRPVA

SEQ ID NO: 2495 - protein, 9 aa, Artificial Sequence
  Synthetic
QPPAGRELS

SEQ ID NO: 2496 - protein, 9 aa, Artificial Sequence
  Synthetic
QQLKQADRD

SEQ ID NO: 2497 - protein, 9 aa, Artificial Sequence
  Synthetic
QQVQVLQRQ

SEQ ID NO: 2498 - protein, 9 aa, Artificial Sequence
  Synthetic
QSIVEAPEL

SEQ ID NO: 2499 - protein, 9 aa, Artificial Sequence
  Synthetic
QVGSSNSAF

SEQ ID NO: 2500 - protein, 9 aa, Artificial Sequence
  Synthetic
RAGLSPATW

SEQ ID NO: 2501 - protein, 9 aa, Artificial Sequence
  Synthetic
RARRALRQD

SEQ ID NO: 2502 - protein, 9 aa, Artificial Sequence
  Synthetic
RASASRARI

SEQ ID NO: 2503 - protein, 9 aa, Artificial Sequence
  Synthetic
RELSAAANA

SEQ ID NO: 2504 - protein, 9 aa, Artificial Sequence
  Synthetic
RETFCITTI

SEQ ID NO: 2505 - protein, 9 aa, Artificial Sequence
  Synthetic
RGFAQRQQL

SEQ ID NO: 2506 - protein, 9 aa, Artificial Sequence
  Synthetic
RGSAATFTL

SEQ ID NO: 2507 - protein, 9 aa, Artificial Sequence
  Synthetic
RGWSIFALY

SEQ ID NO: 2508 - protein, 9 aa, Artificial Sequence
  Synthetic
RKMLYLIYV

SEQ ID NO: 2509 - protein, 9 aa, Artificial Sequence
  Synthetic
RLRKMLYLI

SEQ ID NO: 2510 - protein, 9 aa, Artificial Sequence
  Synthetic
RPQITDAVT

SEQ ID NO: 2511 - protein, 9 aa, Artificial Sequence
  Synthetic
RPSVNGGRI

SEQ ID NO: 2512 - protein, 9 aa, Artificial Sequence
  Synthetic
RRFTHADGW

SEQ ID NO: 2513 - protein, 9 aa, Artificial Sequence
  Synthetic
RSGARATSL

SEQ ID NO: 2514 - protein, 9 aa, Artificial Sequence
  Synthetic
RSRVRALAW

SEQ ID NO: 2515 - protein, 9 aa, Artificial Sequence
  Synthetic
RSRVRALSW

SEQ ID NO: 2516 - protein, 9 aa, Artificial Sequence
  Synthetic
RTHGVGASL

SEQ ID NO: 2517 - protein, 9 aa, Artificial Sequence
  Synthetic
RTRGQARSG

SEQ ID NO: 2518 - protein, 9 aa, Artificial Sequence
  Synthetic
RVAPPAVAL

SEQ ID NO: 2519 - protein, 9 aa, Artificial Sequence
  Synthetic
RVLPEPVKL

SEQ ID NO: 2520 - protein, 9 aa, Artificial Sequence
  Synthetic
RVRALAWLL

SEQ ID NO: 2521 - protein, 9 aa, Artificial Sequence
  Synthetic
RVRALSWLL

SEQ ID NO: 2522 - protein, 9 aa, Artificial Sequence
  Synthetic
RVTVSGGSL

SEQ ID NO: 2523 - protein, 9 aa, Artificial Sequence
  Synthetic
SEAMAAWSE

SEQ ID NO: 2524 - protein, 9 aa, Artificial Sequence
  Synthetic
SESHNFHAS

SEQ ID NO: 2525 - protein, 9 aa, Artificial Sequence
  Synthetic
SGEGRVNIG

SEQ ID NO: 2526 - protein, 9 aa, Artificial Sequence
  Synthetic
SGLAVRVHV

SEQ ID NO: 2527 - protein, 9 aa, Artificial Sequence
  Synthetic
SLADISLGA

SEQ ID NO: 2528 - protein, 9 aa, Artificial Sequence
  Synthetic
SLFAILSST

SEQ ID NO: 2529 - protein, 9 aa, Artificial Sequence
  Synthetic
SLFAPHGNV

SEQ ID NO: 2530 - protein, 9 aa, Artificial Sequence
  Synthetic
SLSIDNATW

SEQ ID NO: 2531 - protein, 9 aa, Artificial Sequence
  Synthetic
SPMEVMLRA

SEQ ID NO: 2532 - protein, 9 aa, Artificial Sequence
  Synthetic
SPQPIRATV

SEQ ID NO: 2533 - protein, 9 aa, Artificial Sequence
  Synthetic
SPRRARRAL

SEQ ID NO: 2534 - protein, 9 aa, Artificial Sequence
  Synthetic
SPSRLAGTL

SEQ ID NO: 2535 - protein, 9 aa, Artificial Sequence
  Synthetic
SSTPLGSLF

SEQ ID NO: 2536 - protein, 9 aa, Artificial Sequence
  Synthetic
STYELLDYL

SEQ ID NO: 2537 - protein, 9 aa, Artificial Sequence
  Synthetic
SVAMKPYEV

SEQ ID NO: 2538 - protein, 9 aa, Artificial Sequence
  Synthetic
SVAPNALAW

SEQ ID NO: 2539 - protein, 9 aa, Artificial Sequence
  Synthetic
SVKVAKKLF

SEQ ID NO: 2540 - protein, 9 aa, Artificial Sequence
  Synthetic
TAFMSGRSL

SEQ ID NO: 2541 - protein, 9 aa, Artificial Sequence
  Synthetic
TAGATPFDI

SEQ ID NO: 2542 - protein, 9 aa, Artificial Sequence
  Synthetic
TAPVTSPAW

SEQ ID NO: 2543 - protein, 9 aa, Artificial Sequence
  Synthetic
TARTGWLTW

SEQ ID NO: 2544 - protein, 9 aa, Artificial Sequence
  Synthetic
TEAQGVQVR

SEQ ID NO: 2545 - protein, 9 aa, Artificial Sequence
  Synthetic
TEVYLEHRM

SEQ ID NO: 2546 - protein, 9 aa, Artificial Sequence
  Synthetic
TFEGKPALE

SEQ ID NO: 2547 - protein, 9 aa, Artificial Sequence
  Synthetic
TFTGKVTNG

SEQ ID NO: 2548 - protein, 9 aa, Artificial Sequence
  Synthetic
TGDGGGHTD

SEQ ID NO: 2549 - protein, 9 aa, Artificial Sequence
  Synthetic
TLAKALSAA

SEQ ID NO: 2550 - protein, 9 aa, Artificial Sequence
  Synthetic
TLANVGDTW

SEQ ID NO: 2551 - protein, 9 aa, Artificial Sequence
  Synthetic
TLNASNLTL

SEQ ID NO: 2552 - protein, 9 aa, Artificial Sequence
  Synthetic
TLSSAHGNV

SEQ ID NO: 2553 - protein, 9 aa, Artificial Sequence
  Synthetic
TPFDIKLKE

SEQ ID NO: 2554 - protein, 9 aa, Artificial Sequence
  Synthetic
TPFIIKLKD

SEQ ID NO: 2555 - protein, 9 aa, Artificial Sequence
  Synthetic
TPGWSIYGL

SEQ ID NO: 2556 - protein, 9 aa, Artificial Sequence
  Synthetic
TPLGSAATF

SEQ ID NO: 2557 - protein, 9 aa, Artificial Sequence
  Synthetic
TPLGSLFAI

SEQ ID NO: 2558 - protein, 9 aa, Artificial Sequence
  Synthetic
TPLPVSLTA

SEQ ID NO: 2559 - protein, 9 aa, Artificial Sequence
  Synthetic
TRQGIMDQY

SEQ ID NO: 2560 - protein, 9 aa, Artificial Sequence
  Synthetic
TSKQDERNY

SEQ ID NO: 2561 - protein, 9 aa, Artificial Sequence
  Synthetic
TSPYDGKYW

SEQ ID NO: 2562 - protein, 9 aa, Artificial Sequence
  Synthetic
TSRRSVASI

SEQ ID NO: 2563 - protein, 9 aa, Artificial Sequence
  Synthetic
TSRTVTMRY

SEQ ID NO: 2564 - protein, 9 aa, Artificial Sequence
  Synthetic
TTEYPNARY

SEQ ID NO: 2565 - protein, 9 aa, Artificial Sequence
  Synthetic
TTEYSNARY

SEQ ID NO: 2566 - protein, 9 aa, Artificial Sequence
  Synthetic
TTLGLEQTF

SEQ ID NO: 2567 - protein, 9 aa, Artificial Sequence
  Synthetic
TVLAAGAGL

SEQ ID NO: 2568 - protein, 9 aa, Artificial Sequence
  Synthetic
TVQELALKL

SEQ ID NO: 2569 - protein, 9 aa, Artificial Sequence
  Synthetic
TVVQRNKHW

SEQ ID NO: 2570 - protein, 9 aa, Artificial Sequence
  Synthetic
VAAAADLAL

SEQ ID NO: 2571 - protein, 9 aa, Artificial Sequence
  Synthetic
VALASQARW

SEQ ID NO: 2572 - protein, 9 aa, Artificial Sequence
  Synthetic
VAMKPYEVT

SEQ ID NO: 2573 - protein, 9 aa, Artificial Sequence
  Synthetic
VARLVKLQG

SEQ ID NO: 2574 - protein, 9 aa, Artificial Sequence
  Synthetic
VAVAGGRWH

SEQ ID NO: 2575 - protein, 9 aa, Artificial Sequence
  Synthetic
VEASAITTY

SEQ ID NO: 2576 - protein, 9 aa, Artificial Sequence
  Synthetic
VEDIGGKNY

SEQ ID NO: 2577 - protein, 9 aa, Artificial Sequence
  Synthetic
VEVSSPPPV

SEQ ID NO: 2578 - protein, 9 aa, Artificial Sequence
  Synthetic
VGAGGYEAG

SEQ ID NO: 2579 - protein, 9 aa, Artificial Sequence
  Synthetic
VGGGEHGRW

SEQ ID NO: 2580 - protein, 9 aa, Artificial Sequence
  Synthetic
VHVSKEEQY

SEQ ID NO: 2581 - protein, 9 aa, Artificial Sequence
  Synthetic
VIDGQKVLA

SEQ ID NO: 2582 - protein, 9 aa, Artificial Sequence
  Synthetic
VIGACTSPY

SEQ ID NO: 2583 - protein, 9 aa, Artificial Sequence
  Synthetic
VKLGGVYEA

SEQ ID NO: 2584 - protein, 9 aa, Artificial Sequence
  Synthetic
VLAPRLYLT

SEQ ID NO: 2585 - protein, 9 aa, Artificial Sequence
  Synthetic
VLVKTNMVV

SEQ ID NO: 2586 - protein, 9 aa, Artificial Sequence
  Synthetic
VPASGAPAA

SEQ ID NO: 2587 - protein, 9 aa, Artificial Sequence
  Synthetic
VPFCFGKDL

SEQ ID NO: 2588 - protein, 9 aa, Artificial Sequence
  Synthetic
VPVSEHCTV

SEQ ID NO: 2589 - protein, 9 aa, Artificial Sequence
  Synthetic
VPVTPPKVE

SEQ ID NO: 2590 - protein, 9 aa, Artificial Sequence
  Synthetic
VRTVSAMEY

SEQ ID NO: 2591 - protein, 9 aa, Artificial Sequence
  Synthetic
VSGGSLSAP

SEQ ID NO: 2592 - protein, 9 aa, Artificial Sequence
  Synthetic
VSSATKAKG

SEQ ID NO: 2593 - protein, 9 aa, Artificial Sequence
  Synthetic
VSSPPPVSV

SEQ ID NO: 2594 - protein, 9 aa, Artificial Sequence
  Synthetic
VSVKVAKKL

SEQ ID NO: 2595 - protein, 9 aa, Artificial Sequence
  Synthetic
VTMRYLASY

SEQ ID NO: 2596 - protein, 9 aa, Artificial Sequence
  Synthetic
VTSVAMKPY

SEQ ID NO: 2597 - protein, 9 aa, Artificial Sequence
  Synthetic
VVAEKVTTP

SEQ ID NO: 2598 - protein, 9 aa, Artificial Sequence
  Synthetic
VVDGPPSRP

SEQ ID NO: 2599 - protein, 9 aa, Artificial Sequence
  Synthetic
VVETAQPLP

SEQ ID NO: 2600 - protein, 9 aa, Artificial Sequence
  Synthetic
WLTWLAILA

SEQ ID NO: 2601 - protein, 9 aa, Artificial Sequence
  Synthetic
WTFHAGYRY

SEQ ID NO: 2602 - protein, 9 aa, Artificial Sequence
  Synthetic
WVMTDNSNV

SEQ ID NO: 2603 - protein, 9 aa, Artificial Sequence
  Synthetic
YAEHGEVSI

SEQ ID NO: 2604 - protein, 9 aa, Artificial Sequence
  Synthetic
YAIDGTAAG

SEQ ID NO: 2605 - protein, 9 aa, Artificial Sequence
  Synthetic
YALKSRIAL

SEQ ID NO: 2606 - protein, 9 aa, Artificial Sequence
  Synthetic
YATNPQTQL

SEQ ID NO: 2607 - protein, 9 aa, Artificial Sequence
  Synthetic
YDTGDLIAY

SEQ ID NO: 2608 - protein, 9 aa, Artificial Sequence
  Synthetic
YEAGFSLGS

SEQ ID NO: 2609 - protein, 9 aa, Artificial Sequence
  Synthetic
YEDATFETY

SEQ ID NO: 2610 - protein, 9 aa, Artificial Sequence
  Synthetic
YENKSSTPL

SEQ ID NO: 2611 - protein, 9 aa, Artificial Sequence
  Synthetic
YEVTPTRML

SEQ ID NO: 2612 - protein, 9 aa, Artificial Sequence
  Synthetic
YEYIWGLYP

SEQ ID NO: 2613 - protein, 9 aa, Artificial Sequence
  Synthetic
YEYIWGLYQ

SEQ ID NO: 2614 - protein, 9 aa, Artificial Sequence
  Synthetic
YEYSKGPKL

SEQ ID NO: 2615 - protein, 9 aa, Artificial Sequence
  Synthetic
YFEPGPTTD

SEQ ID NO: 2616 - protein, 9 aa, Artificial Sequence
  Synthetic
YIWGLYPTY

SEQ ID NO: 2617 - protein, 9 aa, Artificial Sequence
  Synthetic
YIWGLYQTY

SEQ ID NO: 2618 - protein, 9 aa, Artificial Sequence
  Synthetic
YLRQITPGW

SEQ ID NO: 2619 - protein, 9 aa, Artificial Sequence
  Synthetic
YMIYMSGLA

SEQ ID NO: 2620 - protein, 9 aa, Artificial Sequence
  Synthetic
YPALRAALI

SEQ ID NO: 2621 - protein, 9 aa, Artificial Sequence
  Synthetic
YPGTPGDLL

SEQ ID NO: 2622 - protein, 9 aa, Artificial Sequence
  Synthetic
YPTYTEWSV

SEQ ID NO: 2623 - protein, 9 aa, Artificial Sequence
  Synthetic
YQTYTEWSV

SEQ ID NO: 2624 - protein, 9 aa, Artificial Sequence
  Synthetic
YSTGDLRAY

SEQ ID NO: 2625 - protein, 9 aa, Artificial Sequence
  Synthetic
YTLRYLASY

SEQ ID NO: 2626 - protein, 9 aa, Artificial Sequence
  Synthetic
YVLVKTNMV

SEQ ID NO: 2627 - protein, 9 aa, Artificial Sequence
  Synthetic
YYDYEDATF

SEQ ID NO: 2628 - protein, 15 aa, Artificial Sequence
  Synthetic
AAFIALYPNSQLAPT

SEQ ID NO: 2629 - protein, 14 aa, Artificial Sequence
  Synthetic
GGAEYNLALGQRRA

SEQ ID NO: 2630 - protein, 16 aa, Artificial Sequence
  Synthetic
GGAEYNLALGQRRADA

SEQ ID NO: 2631 - protein, 12 aa, Artificial Sequence
  Synthetic
IALYPNSQLAPT

SEQ ID NO: 2632 - protein, 18 aa, Artificial Sequence
  Synthetic
KPDQGEVVAVGPGKKTED

SEQ ID NO: 2633 - protein, 19 aa, Artificial Sequence
  Synthetic
KPDQGEVVAVGPGKKTEDG

SEQ ID NO: 2634 - protein, 14 aa, Artificial Sequence
  Synthetic
LAEVLDYHNFVLTQ

SEQ ID NO: 2635 - protein, 15 aa, Artificial Sequence
  Synthetic
QSIALSSLMVAQAIP

SEQ ID NO: 2636 - protein, 23 aa, Artificial Sequence
  Synthetic
SIGVLGYQKTVDHTKVNSKLSLF

SEQ ID NO: 2637 - protein, 14 aa, Artificial Sequence
  Synthetic
AAHADWNNQSIVKT

SEQ ID NO: 2638 - protein, 6 aa, Artificial Sequence
  Synthetic
AALGRG

SEQ ID NO: 2639 - protein, 14 aa, Artificial Sequence
  Synthetic
AALGRGHSLYASYE

SEQ ID NO: 2640 - protein, 14 aa, Artificial Sequence
  Synthetic
AAPLRRTTLAMALG

SEQ ID NO: 2641 - protein, 14 aa, Artificial Sequence
  Synthetic
AAPLSITLQAGAHA

SEQ ID NO: 2642 - protein, 14 aa, Artificial Sequence
  Synthetic
ADAQGDIVATELPS

SEQ ID NO: 2643 - protein, 14 aa, Artificial Sequence
  Synthetic
ADSGFYLDATLRAS

SEQ ID NO: 2644 - protein, 4 aa, Artificial Sequence
  Synthetic
AELA

SEQ ID NO: 2645 - protein, 14 aa, Artificial Sequence
  Synthetic
AELAVFRAGGGAYR

SEQ ID NO: 2646 - protein, 14 aa, Artificial Sequence
  Synthetic
AELQFRNGSVTSSG

SEQ ID NO: 2647 - protein, 14 aa, Artificial Sequence
  Synthetic
AGGRWHLGGLAGYT

SEQ ID NO: 2648 - protein, 14 aa, Artificial Sequence
  Synthetic
AGVAAMQGAVVHLQ

SEQ ID NO: 2649 - protein, 14 aa, Artificial Sequence
  Synthetic
AGYTRGDRGFTGDG

SEQ ID NO: 2650 - protein, 14 aa, Artificial Sequence
  Synthetic
ALASQARWTGATRA

SEQ ID NO: 2651 - protein, 14 aa, Artificial Sequence
  Synthetic
AMPWTFHAGYRYSW

SEQ ID NO: 2652 - protein, 20 aa, Artificial Sequence
  Synthetic
AMQGAVVHLQRATIRRGDAP

SEQ ID NO: 2653 - protein, 9 aa, Artificial Sequence
  Synthetic
ANGLRVRDE

SEQ ID NO: 2654 - protein, 14 aa, Artificial Sequence
  Synthetic
ANGLRVRDEGGSSV

SEQ ID NO: 2655 - protein, 14 aa, Artificial Sequence
  Synthetic
ANKDGKVDIGTYRY

SEQ ID NO: 2656 - protein, 14 aa, Artificial Sequence
  Synthetic
APAAVSVLGASELT

SEQ ID NO: 2657 - protein, 14 aa, Artificial Sequence
  Synthetic
APPAPKPAPQPGPQ

SEQ ID NO: 2658 - protein, 14 aa, Artificial Sequence
  Synthetic
AQGILLENPAAELQ

SEQ ID NO: 2659 - protein, 14 aa, Artificial Sequence
  Synthetic
ARWTGATRAVDSLS

SEQ ID NO: 2660 - protein, 14 aa, Artificial Sequence
  Synthetic
ASLEAGRRFTHADG

SEQ ID NO: 2661 - protein, 14 aa, Artificial Sequence
  Synthetic
ASYEYSKGPKLAMP

SEQ ID NO: 2662 - protein, 9 aa, Artificial Sequence
  Synthetic
ATFTLANKD

SEQ ID NO: 2663 - protein, 14 aa, Artificial Sequence
  Synthetic
ATFTLANKDGKVDI

SEQ ID NO: 2664 - protein, 14 aa, Artificial Sequence
  Synthetic
ATRAVDSLSIDNAT

SEQ ID NO: 2665 - protein, 15 aa, Artificial Sequence
  Synthetic
DDDGIALYVAGEQAQ

SEQ ID NO: 2666 - protein, 14 aa, Artificial Sequence
  Synthetic
DDGIALYVAGEQAQ

SEQ ID NO: 2667 - protein, 14 aa, Artificial Sequence
  Synthetic
DGGHITGGRAAGVA

SEQ ID NO: 2668 - protein, 16 aa, Artificial Sequence
  Synthetic
DGIRRFLGTVTVKAGK

SEQ ID NO: 2669 - protein, 14 aa, Artificial Sequence
  Synthetic
DGSVDFQQPAEAGR

SEQ ID NO: 2670 - protein, 14 aa, Artificial Sequence
  Synthetic
DGYAVKGKYRTHGV

SEQ ID NO: 2671 - protein, 14 aa, Artificial Sequence
  Synthetic
DIVATELPSIPGTS

SEQ ID NO: 2672 - protein, 14 aa, Artificial Sequence
  Synthetic
DKLVVMQDASGQHR

SEQ ID NO: 2673 - protein, 14 aa, Artificial Sequence
  Synthetic
DLGLSDKLVVMQDA

SEQ ID NO: 2674 - protein, 15 aa, Artificial Sequence
  Synthetic
DNATWVMTDNSNVGA

SEQ ID NO: 2675 - protein, 19 aa, Artificial Sequence
  Synthetic
DNATWVMTDNSNVGALRLA

SEQ ID NO: 2676 - protein, 14 aa, Artificial Sequence
  Synthetic
DNRAGRRFDQKVAG

SEQ ID NO: 2677 - protein, 14 aa, Artificial Sequence
  Synthetic
EAGRFKVLTVNTLA

SEQ ID NO: 2678 - protein, 14 aa, Artificial Sequence
  Synthetic
ELAQSIVEAPELGA

SEQ ID NO: 2679 - protein, 14 aa, Artificial Sequence
  Synthetic
ELGAAIRVGRGARV

SEQ ID NO: 2680 - protein, 14 aa, Artificial Sequence
  Synthetic
ELGADHAVAVAGGR

SEQ ID NO: 2681 - protein, 14 aa, Artificial Sequence
  Synthetic
ELPSIPGTSIGPLD

SEQ ID NO: 2682 - protein, 14 aa, Artificial Sequence
  Synthetic
EPVKLTLTGGADAQ

SEQ ID NO: 2683 - protein, 14 aa, Artificial Sequence
  Synthetic
EQAQASIADSTLQG

SEQ ID NO: 2684 - protein, 14 aa, Artificial Sequence
  Synthetic
ERGANVTVQRSAIV

SEQ ID NO: 2685 - protein, 14 aa, Artificial Sequence
  Synthetic
ERQHGIHIQGSDPG

SEQ ID NO: 2686 - protein, 14 aa, Artificial Sequence
  Synthetic
EVGKRIELAGGRQV

SEQ ID NO: 2687 - protein, 14 aa, Artificial Sequence
  Synthetic
FDGAGTVHTNGIAH

SEQ ID NO: 2688 - protein, 14 aa, Artificial Sequence
  Synthetic
FQQPAEAGRFKVLT

SEQ ID NO: 2689 - protein, 14 aa, Artificial Sequence
  Synthetic
FRAGGGAYRAANGL

SEQ ID NO: 2690 - protein, 14 aa, Artificial Sequence
  Synthetic
GAHAQGKALLYRVL

SEQ ID NO: 2691 - protein, 14 aa, Artificial Sequence
  Synthetic
GARVTVSGGSLSAP

SEQ ID NO: 2692 - protein, 14 aa, Artificial Sequence
  Synthetic
GAYRAANGLRVRDE

SEQ ID NO: 2693 - protein, 14 aa, Artificial Sequence
  Synthetic
GDAPAGGAVPGGAV

SEQ ID NO: 2694 - protein, 14 aa, Artificial Sequence
  Synthetic
GGAVPGGAVPGGFG

SEQ ID NO: 2695 - protein, 14 aa, Artificial Sequence
  Synthetic
GGAVPGGFGPVLDG

SEQ ID NO: 2696 - protein, 14 aa, Artificial Sequence
  Synthetic
GGFGPVLDGWYGVD

SEQ ID NO: 2697 - protein, 14 aa, Artificial Sequence
  Synthetic
GGLHIGALQSLQPE

SEQ ID NO: 2698 - protein, 14 aa, Artificial Sequence
  Synthetic
GGVQIERGANVTVQ

SEQ ID NO: 2699 - protein, 14 aa, Artificial Sequence
  Synthetic
GHSLYASYEYSKGP

SEQ ID NO: 2700 - protein, 14 aa, Artificial Sequence
  Synthetic
GHTDSVHVGGYATY

SEQ ID NO: 2701 - protein, 14 aa, Artificial Sequence
  Synthetic
GIAHRTELRGTRAE

SEQ ID NO: 2702 - protein, 14 aa, Artificial Sequence
  Synthetic
GKALLYRVLPEPVK

SEQ ID NO: 2703 - protein, 14 aa, Artificial Sequence
  Synthetic
GLGMAAALGRGHSL

SEQ ID NO: 2704 - protein, 14 aa, Artificial Sequence
  Synthetic
GNVIETGGARRFAP

SEQ ID NO: 2705 - protein, 14 aa, Artificial Sequence
  Synthetic
GPLDVALASQARWT

SEQ ID NO: 2706 - protein, 9 aa, Artificial Sequence
  Synthetic
GQHRLWVRN

SEQ ID NO: 2707 - protein, 14 aa, Artificial Sequence
  Synthetic
GRGFAQRQQLDNRA

SEQ ID NO: 2708 - protein, 14 aa, Artificial Sequence
  Synthetic
GRLGLEVGKRIELA

SEQ ID NO: 2709 - protein, 14 aa, Artificial Sequence
  Synthetic
GRQVQPYIKASVLQ

SEQ ID NO: 2710 - protein, 19 aa, Artificial Sequence
  Synthetic
GRRFTHADGWFLEPQAELA

SEQ ID NO: 2711 - protein, 14 aa, Artificial Sequence
  Synthetic
GSEPASANTLLLVQ

SEQ ID NO: 2712 - protein, 14 aa, Artificial Sequence
  Synthetic
GSSVLGRLGLEVGK

SEQ ID NO: 2713 - protein, 14 aa, Artificial Sequence
  Synthetic
GTTIKVSGRQAQGI

SEQ ID NO: 2714 - protein, 14 aa, Artificial Sequence
  Synthetic
GTVTVKAGKLVADH

SEQ ID NO: 2715 - protein, 14 aa, Artificial Sequence
  Synthetic
HAVAVAGGRWHLGG

SEQ ID NO: 2716 - protein, 14 aa, Artificial Sequence
  Synthetic
IELAGGRQVQPYIK

SEQ ID NO: 2717 - protein, 14 aa, Artificial Sequence
  Synthetic
IHIQGSDPGGVRTA

SEQ ID NO: 2718 - protein, 14 aa, Artificial Sequence
  Synthetic
IRRFLGTVTVKAGK

SEQ ID NO: 2719 - protein, 14 aa, Artificial Sequence
  Synthetic
IRVGRGARVTVSGG

SEQ ID NO: 2720 - protein, 9 aa, Artificial Sequence
  Synthetic
ITLQAGAHA

SEQ ID NO: 2721 - protein, 14 aa, Artificial Sequence
  Synthetic
ITLQAGAHAQGKAL

SEQ ID NO: 2722 - protein, 14 aa, Artificial Sequence
  Synthetic
IVEAPELGAAIRVG

SEQ ID NO: 2723 - protein, 14 aa, Artificial Sequence
  Synthetic
IVKTGERQHGIHIQ

SEQ ID NO: 2724 - protein, 14 aa, Artificial Sequence
  Synthetic
KAGKLVADHATLAN

SEQ ID NO: 2725 - protein, 14 aa, Artificial Sequence
  Synthetic
KGKYRTHGVGASLE

SEQ ID NO: 2726 - protein, 14 aa, Artificial Sequence
  Synthetic
KPAPQPGPQPPQPP

SEQ ID NO: 2727 - protein, 14 aa, Artificial Sequence
  Synthetic
KVAGFELGADHAVA

SEQ ID NO: 2728 - protein, 14 aa, Artificial Sequence
  Synthetic
KVAGSDGYAVKGKY

SEQ ID NO: 2729 - protein, 14 aa, Artificial Sequence
  Synthetic
KVDIGTYRYRLAAN

SEQ ID NO: 2730 - protein, 14 aa, Artificial Sequence
  Synthetic
KVLTVNTLAGSGLF

SEQ ID NO: 2731 - protein, 14 aa, Artificial Sequence
  Synthetic
LAANGNGQWSLVGA

SEQ ID NO: 2732 - protein, 14 aa, Artificial Sequence
  Synthetic
LAMPWTFHAGYRYS

SEQ ID NO: 2733 - protein, 14 aa, Artificial Sequence
  Synthetic
LASTLWYAESNALS

SEQ ID NO: 2734 - protein, 14 aa, Artificial Sequence
  Synthetic
LENDFKVAGSDGYA

SEQ ID NO: 2735 - protein, 14 aa, Artificial Sequence
  Synthetic
LENPAAELQFRNGS

SEQ ID NO: 2736 - protein, 14 aa, Artificial Sequence
  Synthetic
LGAAPAAHADWNNQ

SEQ ID NO: 2737 - protein, 18 aa, Artificial Sequence
  Synthetic
LGGLAGYTRGDRGFTGDG

SEQ ID NO: 2738 - protein, 5 aa, Artificial Sequence
  Synthetic
LLENP

SEQ ID NO: 2739 - protein, 14 aa, Artificial Sequence
  Synthetic
LLVQTPLGSAATFT

SEQ ID NO: 2740 - protein, 14 aa, Artificial Sequence
  Synthetic
LPPSRVVLRDTNVT

SEQ ID NO: 2741 - protein, 9 aa, Artificial Sequence
  Synthetic
LQPEDLPPS

SEQ ID NO: 2742 - protein, 14 aa, Artificial Sequence
  Synthetic
LQPEDLPPSRVVLR

SEQ ID NO: 2743 - protein, 14 aa, Artificial Sequence
  Synthetic
LRASRLENDFKVAG

SEQ ID NO: 2744 - protein, 14 aa, Artificial Sequence
  Synthetic
LRLASDGSVDFQQP

SEQ ID NO: 2745 - protein, 14 aa, Artificial Sequence
  Synthetic
LSAAANAAVNTGGV

SEQ ID NO: 2746 - protein, 14 aa, Artificial Sequence
  Synthetic
LSAPHGNVIETGGA

SEQ ID NO: 2747 - protein, 14 aa, Artificial Sequence
  Synthetic
LSDDGIRRFLGTVT

SEQ ID NO: 2748 - protein, 14 aa, Artificial Sequence
  Synthetic
LVGAKAPPAPKPAP

SEQ ID NO: 2749 - protein, 14 aa, Artificial Sequence
  Synthetic
LYVAGEQAQASIAD

SEQ ID NO: 2750 - protein, 14 aa, Artificial Sequence
  Synthetic
MALGALGAAPAAHA

SEQ ID NO: 2751 - protein, 14 aa, Artificial Sequence
  Synthetic
MNMSLSRIVKAAPL

SEQ ID NO: 2752 - protein, 9 aa, Artificial Sequence
  Synthetic
MQDASGQHR

SEQ ID NO: 2753 - protein, 14 aa, Artificial Sequence
  Synthetic
MQGAVVHLQRATIR

SEQ ID NO: 2754 - protein, 14 aa, Artificial Sequence
  Synthetic
NAAVNTGGVGLAST

SEQ ID NO: 2755 - protein, 14 aa, Artificial Sequence
  Synthetic
NALSKRLGELRLNP

SEQ ID NO: 2756 - protein, 14 aa, Artificial Sequence
  Synthetic
NGQWSLVGAKAPPA

SEQ ID NO: 2757 - protein, 14 aa, Artificial Sequence
  Synthetic
NTLAGSGLFRMNVF

SEQ ID NO: 2758 - protein, 14 aa, Artificial Sequence
  Synthetic
PAGRELSAAANAAV

SEQ ID NO: 2759 - protein, 14 aa, Artificial Sequence
  Synthetic
PAPQPPAGRELSAA

SEQ ID NO: 2760 - protein, 14 aa, Artificial Sequence
  Synthetic
PGPQPPQPPQPQPE

SEQ ID NO: 2761 - protein, 14 aa, Artificial Sequence
  Synthetic
PGTSIGPLDVALAS

SEQ ID NO: 2762 - protein, 14 aa, Artificial Sequence
  Synthetic
PLGSAATFTLANKD

SEQ ID NO: 2763 - protein, 14 aa, Artificial Sequence
  Synthetic
PQPEAPAPQPPAGR

SEQ ID NO: 2764 - protein, 14 aa, Artificial Sequence
  Synthetic
PQPPQPQPEAPAPQ

SEQ ID NO: 2765 - protein, 14 aa, Artificial Sequence
  Synthetic
PYIKASVLQEFDGA

SEQ ID NO: 2766 - protein, 14 aa, Artificial Sequence
  Synthetic
RFAPQAAPLSITLQ

SEQ ID NO: 2767 - protein, 14 aa, Artificial Sequence
  Synthetic
RLGELRLNPDAGGA

SEQ ID NO: 2768 - protein, 14 aa, Artificial Sequence
  Synthetic
RLNPDAGGAWGRGF

SEQ ID NO: 2769 - protein, 14 aa, Artificial Sequence
  Synthetic
RNGSVTSSGQLSDD

SEQ ID NO: 2770 - protein, 14 aa, Artificial Sequence
  Synthetic
RRFDQKVAGFELGA

SEQ ID NO: 2771 - protein, 14 aa, Artificial Sequence
  Synthetic
RTTLAMALGALGAA

SEQ ID NO: 2772 - protein, 14 aa, Artificial Sequence
  Synthetic
SAIVDGGLHIGALQ

SEQ ID NO: 2773 - protein, 14 aa, Artificial Sequence
  Synthetic
SANTLLLVQTPLGS

SEQ ID NO: 2774 - protein, 14 aa, Artificial Sequence
  Synthetic
SDPGGVRTASGTTI

SEQ ID NO: 2775 - protein, 14 aa, Artificial Sequence
  Synthetic
SELTLDGGHITGGR

SEQ ID NO: 2776 - protein, 9 aa, Artificial Sequence
  Synthetic
SGLFRMNVF

SEQ ID NO: 2777 - protein, 14 aa, Artificial Sequence
  Synthetic
SGLFRMNVFADLGL

SEQ ID NO: 2778 - protein, 14 aa, Artificial Sequence
  Synthetic
SGSSVELAQSIVEA

SEQ ID NO: 2779 - protein, 14 aa, Artificial Sequence
  Synthetic
SIADSTLQGAGGVQ

SEQ ID NO: 2780 - protein, 14 aa, Artificial Sequence
  Synthetic
SKGPKLAMPWTFHA

SEQ ID NO: 2781 - protein, 14 aa, Artificial Sequence
  Synthetic
SNVGALRLASDGSV

SEQ ID NO: 2782 - protein, 14 aa, Artificial Sequence
  Synthetic
SRIVKAAPLRRTTL

SEQ ID NO: 2783 - protein, 14 aa, Artificial Sequence
  Synthetic
SVLGASELTLDGGH

SEQ ID NO: 2784 - protein, 9 aa, Artificial Sequence
  Synthetic
SVLQEFDGA

SEQ ID NO: 2785 - protein, 14 aa, Artificial Sequence
  Synthetic
SVLQEFDGAGTVHT

SEQ ID NO: 2786 - protein, 4 aa, Artificial Sequence
  Synthetic
TELR

SEQ ID NO: 2787 - protein, 14 aa, Artificial Sequence
  Synthetic
TELRGTRAELGLGM

SEQ ID NO: 2788 - protein, 14 aa, Artificial Sequence
  Synthetic
TGDGGGHTDSVHVG

SEQ ID NO: 2789 - protein, 14 aa, Artificial Sequence
  Synthetic
TGGARRFAPQAAPL

SEQ ID NO: 2790 - protein, 14 aa, Artificial Sequence
  Synthetic
TGGRAAGVAAMQGA

SEQ ID NO: 2791 - protein, 14 aa, Artificial Sequence
  Synthetic
TGGVGLASTLWYAE

SEQ ID NO: 2792 - protein, 14 aa, Artificial Sequence
  Synthetic
THGVGASLEAGRRF

SEQ ID NO: 2793 - protein, 9 aa, Artificial Sequence
  Synthetic
TIRRGDAPA

SEQ ID NO: 2794 - protein, 14 aa, Artificial Sequence
  Synthetic
TLANVGDTWDDDGI

SEQ ID NO: 2795 - protein, 14 aa, Artificial Sequence
  Synthetic
TLQGAGGVQIERGA

SEQ ID NO: 2796 - protein, 14 aa, Artificial Sequence
  Synthetic
TLTGGADAQGDIVA

SEQ ID NO: 2797 - protein, 14 aa, Artificial Sequence
  Synthetic
TNVTAVPASGAPAA

SEQ ID NO: 2798 - protein, 14 aa, Artificial Sequence
  Synthetic
TRAELGLGMAAALG

SEQ ID NO: 2799 - protein, 14 aa, Artificial Sequence
  Synthetic
TSSGQLSDDGIRRF

SEQ ID NO: 2800 - protein, 14 aa, Artificial Sequence
  Synthetic
TVHTNGIAHRTELR

SEQ ID NO: 2801 - protein, 14 aa, Artificial Sequence
  Synthetic
TYRYRLAANGNGQW

SEQ ID NO: 2802 - protein, 14 aa, Artificial Sequence
  Synthetic
VADHATLANVGDTW

SEQ ID NO: 2803 - protein, 14 aa, Artificial Sequence
  Synthetic
VHVGGYATYIADSG

SEQ ID NO: 2804 - protein, 9 aa, Artificial Sequence
  Synthetic
VLDGWYGVD

SEQ ID NO: 2805 - protein, 14 aa, Artificial Sequence
  Synthetic
VPASGAPAAVSVLG

SEQ ID NO: 2806 - protein, 14 aa, Artificial Sequence
  Synthetic
VRDEGGSSVLGRLG

SEQ ID NO: 2807 - protein, 14 aa, Artificial Sequence
  Synthetic
VRTASGTTIKVSGR

SEQ ID NO: 2808 - protein, 14 aa, Artificial Sequence
  Synthetic
VSGGSLSAPHGNVI

SEQ ID NO: 2809 - protein, 14 aa, Artificial Sequence
  Synthetic
VSGRQAQGILLENP

SEQ ID NO: 2810 - protein, 14 aa, Artificial Sequence
  Synthetic
VTVQRSAIVDGGLH

SEQ ID NO: 2811 - protein, 14 aa, Artificial Sequence
  Synthetic
VVLRDTNVTAVPAS

SEQ ID NO: 2812 - protein, 14 aa, Artificial Sequence
  Synthetic
WNNQSIVKTGERQH

SEQ ID NO: 2813 - protein, 14 aa, Artificial Sequence
  Synthetic
WVRNSGSEPASANT

SEQ ID NO: 2814 - protein, 14 aa, Artificial Sequence
  Synthetic
WYAESNALSKRLGE

SEQ ID NO: 2815 - protein, 14 aa, Artificial Sequence
  Synthetic
YATYIADSGFYLDA

SEQ ID NO: 2816 - protein, 9 aa, Artificial Sequence
  Synthetic
YGVDVSGSS

SEQ ID NO: 2817 - protein, 14 aa, Artificial Sequence
  Synthetic
YGVDVSGSSVELAQ

SEQ ID NO: 2818 - protein, 14 aa, Artificial Sequence
  Synthetic
YLDATLRASRLEND

SEQ ID NO: 2819 - protein, 14 aa, Artificial Sequence
  Synthetic
YRVLPEPVKLTLTG

SEQ ID NO: 2820 - protein, 16 aa, Artificial Sequence
  Synthetic
VKAQNITNKRAALIEA

SEQ ID NO: 2821 - protein, 16 aa, Artificial Sequence
  Synthetic
YYSNVTATRLLSSTNS

SEQ ID NO: 2822 - protein, 15 aa, Artificial Sequence
  Synthetic
SPNLTDERAAQAGVT

SEQ ID NO: 2823 - protein, 15 aa, Artificial Sequence
  Synthetic
SSRASDERAAHLPTS

SEQ ID NO: 2824 - protein, 15 aa, Artificial Sequence
  Synthetic
QVVHNSYNRPAYSPG

SEQ ID NO: 2825 - protein, 9 aa, Artificial Sequence
  Synthetic
AEGGEIHEL

SEQ ID NO: 2826 - protein, 12 aa, Artificial Sequence
  Synthetic
AENLISNGIGKY

SEQ ID NO: 2827 - protein, 9 aa, Artificial Sequence
  Synthetic
AEVDGDVKL

SEQ ID NO: 2828 - protein, 9 aa, Artificial Sequence
  Synthetic
AIYTAEIHK

SEQ ID NO: 2829 - protein, 9 aa, Artificial Sequence
  Synthetic
APVFHMTNY

SEQ ID NO: 2830 - protein, 16 aa, Artificial Sequence
  Synthetic
APVFHMTNYLEQPVSN

SEQ ID NO: 2831 - protein, 8 aa, Artificial Sequence
  Synthetic
AQRLNEIY

SEQ ID NO: 2832 - protein, 9 aa, Artificial Sequence
  Synthetic
ARVPHAYSL

SEQ ID NO: 2833 - protein, 9 aa, Artificial Sequence
  Synthetic
AVRDLERAM

SEQ ID NO: 2834 - protein, 13 aa, Artificial Sequence
  Synthetic
AVRDLERAMTTLK

SEQ ID NO: 2835 - protein, 9 aa, Artificial Sequence
  Synthetic
DALLRLQAM

SEQ ID NO: 2836 - protein, 9 aa, Artificial Sequence
  Synthetic
DIKEKVINL

SEQ ID NO: 2837 - protein, 8 aa, Artificial Sequence
  Synthetic
DQGLFKVL

SEQ ID NO: 2838 - protein, 9 aa, Artificial Sequence
  Synthetic
DTGVDTRIW

SEQ ID NO: 2839 - protein, 12 aa, Artificial Sequence
  Synthetic
EPIGSLAIEEAM

SEQ ID NO: 2840 - protein, 10 aa, Artificial Sequence
  Synthetic
EPIRDALNAM

SEQ ID NO: 2841 - protein, 8 aa, Artificial Sequence
  Synthetic
FPKLGKTL

SEQ ID NO: 2842 - protein, 9 aa, Artificial Sequence
  Synthetic
FRSVNAVAF

SEQ ID NO: 2843 - protein, 10 aa, Artificial Sequence
  Synthetic
GKIIDNTEQL

SEQ ID NO: 2844 - protein, 9 aa, Artificial Sequence
  Synthetic
GLNEKLVFY

SEQ ID NO: 2845 - protein, 11 aa, Artificial Sequence
  Synthetic
GMYGGTYLVEK

SEQ ID NO: 2846 - protein, 14 aa, Artificial Sequence
  Synthetic
GPPISLERLDVGTN

SEQ ID NO: 2847 - protein, 10 aa, Artificial Sequence
  Synthetic
GPRQAQVSFL

SEQ ID NO: 2848 - protein, 11 aa, Artificial Sequence
  Synthetic
GRLVPQVRVID

SEQ ID NO: 2849 - protein, 10 aa, Artificial Sequence
  Synthetic
GSAPISMGFR

SEQ ID NO: 2850 - protein, 9 aa, Artificial Sequence
  Synthetic
HILAKSTAL

SEQ ID NO: 2851 - protein, 9 aa, Artificial Sequence
  Synthetic
HYREVNLVY

SEQ ID NO: 2852 - protein, 9 aa, Artificial Sequence
  Synthetic
IPPMKNLAL

SEQ ID NO: 2853 - protein, 12 aa, Artificial Sequence
  Synthetic
IPYQGSGKGVSF

SEQ ID NO: 2854 - protein, 9 aa, Artificial Sequence
  Synthetic
ISKESQHVY

SEQ ID NO: 2855 - protein, 9 aa, Artificial Sequence
  Synthetic
IVSSHFFVY

SEQ ID NO: 2856 - protein, 10 aa, Artificial Sequence
  Synthetic
KEIKETGRLF

SEQ ID NO: 2857 - protein, 9 aa, Artificial Sequence
  Synthetic
KESQHVYYL

SEQ ID NO: 2858 - protein, 9 aa, Artificial Sequence
  Synthetic
KIIDNTEQL

SEQ ID NO: 2859 - protein, 8 aa, Artificial Sequence
  Synthetic
KKQINRQN

SEQ ID NO: 2860 - protein, 10 aa, Artificial Sequence
  Synthetic
KKVDTNFIYQ

SEQ ID NO: 2861 - protein, 9 aa, Artificial Sequence
  Synthetic
KLIDGFFPA

SEQ ID NO: 2862 - protein, 11 aa, Artificial Sequence
  Synthetic
KPNLSSKRSEL

SEQ ID NO: 2863 - protein, 9 aa, Artificial Sequence
  Synthetic
KVSPYLFTV

SEQ ID NO: 2864 - protein, 10 aa, Artificial Sequence
  Synthetic
LETRTTNQFL

SEQ ID NO: 2865 - protein, 8 aa, Artificial Sequence
  Synthetic
LLKEATEL

SEQ ID NO: 2866 - protein, 9 aa, Artificial Sequence
  Synthetic
LLKKGNSLY

SEQ ID NO: 2867 - protein, 10 aa, Artificial Sequence
  Synthetic
LPAPIGGMNY

SEQ ID NO: 2868 - protein, 10 aa, Artificial Sequence
  Synthetic
MPEETLHQVM

SEQ ID NO: 2869 - protein, 9 aa, Artificial Sequence
  Synthetic
PTTIRGQFS

SEQ ID NO: 2870 - protein, 11 aa, Artificial Sequence
  Synthetic
QEISRHQALGY

SEQ ID NO: 2871 - protein, 10 aa, Artificial Sequence
  Synthetic
RITHVDTESY

SEQ ID NO: 2872 - protein, 8 aa, Artificial Sequence
  Synthetic
RPGLKPDL

SEQ ID NO: 2873 - protein, 8 aa, Artificial Sequence
  Synthetic
RPIYGLEV

SEQ ID NO: 2874 - protein, 11 aa, Artificial Sequence
  Synthetic
RQAGQEMILAV

SEQ ID NO: 2875 - protein, 9 aa, Artificial Sequence
  Synthetic
SAVRIATVY

SEQ ID NO: 2876 - protein, 11 aa, Artificial Sequence
  Synthetic
SLMPEETLHQV

SEQ ID NO: 2877 - protein, 9 aa, Artificial Sequence
  Synthetic
SMIDLVTKF

SEQ ID NO: 2878 - protein, 13 aa, Artificial Sequence
  Synthetic
SMLNSQAIDNLRA

SEQ ID NO: 2879 - protein, 8 aa, Artificial Sequence
  Synthetic
SMYRVFEV

SEQ ID NO: 2880 - protein, 9 aa, Artificial Sequence
  Synthetic
SQQGMFHAY

SEQ ID NO: 2881 - protein, 14 aa, Artificial Sequence
  Synthetic
TDTPIVYNDRNLLD

SEQ ID NO: 2882 - protein, 12 aa, Artificial Sequence
  Synthetic
VIINDDQGLFKV

SEQ ID NO: 2883 - protein, 10 aa, Artificial Sequence
  Synthetic
YESGVRIASL

SEQ ID NO: 2884 - protein, 8 aa, Artificial Sequence
  Synthetic
YLKDKALA

SEQ ID NO: 2885 - protein, 11 aa, Artificial Sequence
  Synthetic
YVYDHSGEAVK

SEQ ID NO: 2886 - protein, 15 aa, Artificial Sequence
  Synthetic
ARVIDPAAQSFTGVV

SEQ ID NO: 2887 - protein, 15 aa, Artificial Sequence
  Synthetic
SDRASARVIDPAAQS

SEQ ID NO: 2888 - protein, 15 aa, Artificial Sequence
  Synthetic
VPPGKFVTAALLNTP

SEQ ID NO: 2889 - protein, 15 aa, Artificial Sequence
  Synthetic
WVTPVIGSQARKCGL

SEQ ID NO: 2890 - DNA, 20 bp, Artificial Sequence
  Synthetic
ggcccagactgagcacgtga

SEQ ID NO: 2891 - DNA, 20 bp, Artificial Sequence
  Synthetic
ggcccagactgagcacgtga

SEQ ID NO: 2892 - DNA, 20 bp, Artificial Sequence
  Synthetic
ggcccagactgagcacgtga

SEQ ID NO: 2893 - DNA, 20 bp, Artificial Sequence
  Synthetic
ggcccagactgagcacgtga

SEQ ID NO: 2894 - DNA, 20 bp, Artificial Sequence
  Synthetic
ggcccagactgagcacgtga

SEQ ID NO: 2895 - DNA, 20 bp, Artificial Sequence
  Synthetic
ggcccagactgagcacgtga

SEQ ID NO: 2896 - DNA, 20 bp, Artificial Sequence
  Synthetic
ggcccagactgagcacgtga

SEQ ID NO: 2897 - DNA, 20 bp, Artificial Sequence
  Synthetic
ggcccagactgagcacgtga

SEQ ID NO: 2898 - DNA, 20 bp, Artificial Sequence
  Synthetic
ggcccagactgagcacgtga

SEQ ID NO: 2899 - DNA, 20 bp, Artificial Sequence
  Synthetic
ggcccagactgagcacgtga

SEQ ID NO: 2900 - DNA, 20 bp, Artificial Sequence
  Synthetic
gagtccgagcagaagaagaa

SEQ ID NO: 2901 - DNA, 20 bp, Artificial Sequence
  Synthetic
gagtccgagcagaagaagaa

SEQ ID NO: 2902 - DNA, 20 bp, Artificial Sequence
  Synthetic
gagtccgagcagaagaagaa

SEQ ID NO: 2903 - DNA, 20 bp, Artificial Sequence
  Synthetic
gagtccgagcagaagaagaa

SEQ ID NO: 2904 - DNA, 20 bp, Artificial Sequence
  Synthetic
gagtccgagcagaagaagaa

SEQ ID NO: 2905 - DNA, 20 bp, Artificial Sequence
  Synthetic
gagtccgagcagaagaagaa

SEQ ID NO: 2906 - DNA, 20 bp, Artificial Sequence
  Synthetic
gagtccgagcagaagaagaa

SEQ ID NO: 2907 - DNA, 20 bp, Artificial Sequence
  Synthetic
gagtccgagcagaagaagaa

SEQ ID NO: 2908 - DNA, 20 bp, Artificial Sequence
  Synthetic
gagtccgagcagaagaagaa

SEQ ID NO: 2909 - DNA, 20 bp, Artificial Sequence
  Synthetic
ggaatcccttctgcagcacc

SEQ ID NO: 2910 - DNA, 20 bp, Artificial Sequence
  Synthetic
ggaatcccttctgcagcacc

SEQ ID NO: 2911 - DNA, 20 bp, Artificial Sequence
  Synthetic
ggaatcccttctgcagcacc

SEQ ID NO: 2912 - DNA, 20 bp, Artificial Sequence
  Synthetic
ggaatcccttctgcagcacc

SEQ ID NO: 2913 - DNA, 20 bp, Artificial Sequence
  Synthetic
ggaatcccttctgcagcacc

SEQ ID NO: 2914 - DNA, 20 bp, Artificial Sequence
  Synthetic
ggaatcccttctgcagcacc

SEQ ID NO: 2915 - DNA, 20 bp, Artificial Sequence
  Synthetic
ggaatcccttctgcagcacc

SEQ ID NO: 2916 - DNA, 20 bp, Artificial Sequence
  Synthetic
ggaatcccttctgcagcacc

SEQ ID NO: 2917 - DNA, 20 bp, Artificial Sequence
  Synthetic
ggaatcccttctgcagcacc

SEQ ID NO: 2918 - DNA, 20 bp, Artificial Sequence
  Synthetic
ggaatcccttctgcagcacc

SEQ ID NO: 2919 - DNA, 20 bp, Artificial Sequence
  Synthetic
gtcatcttagtcattacctg

SEQ ID NO: 2920 - DNA, 20 bp, Artificial Sequence
  Synthetic
gtcatcttagtcattacctg

SEQ ID NO: 2921 - DNA, 20 bp, Artificial Sequence
  Synthetic
gtcatcttagtcattacctg

SEQ ID NO: 2922 - DNA, 20 bp, Artificial Sequence
  Synthetic
gtcatcttagtcattacctg

SEQ ID NO: 2923 - DNA, 20 bp, Artificial Sequence
  Synthetic
gtcatcttagtcattacctg

SEQ ID NO: 2924 - DNA, 20 bp, Artificial Sequence
  Synthetic
gtcatcttagtcattacctg

SEQ ID NO: 2925 - DNA, 20 bp, Artificial Sequence
  Synthetic
gtcatcttagtcattacctg

SEQ ID NO: 2926 - DNA, 20 bp, Artificial Sequence
  Synthetic
gtcatcttagtcattacctg

SEQ ID NO: 2927 - DNA, 20 bp, Artificial Sequence
  Synthetic
gtcatcttagtcattacctg

SEQ ID NO: 2928 - DNA, 20 bp, Artificial Sequence
  Synthetic
ggcactgcggctggaggtgg

SEQ ID NO: 2929 - DNA, 20 bp, Artificial Sequence
  Synthetic
ggcactgcggctggaggtgg

SEQ ID NO: 2930 - DNA, 20 bp, Artificial Sequence
  Synthetic
ggcactgcggctggaggtgg

SEQ ID NO: 2931 - DNA, 20 bp, Artificial Sequence
  Synthetic
ggcactgcggctggaggtgg

SEQ ID NO: 2932 - DNA, 20 bp, Artificial Sequence
  Synthetic
ggcactgcggctggaggtgg

SEQ ID NO: 2933 - DNA, 20 bp, Artificial Sequence
  Synthetic
ggcactgcggctggaggtgg

SEQ ID NO: 2934 - DNA, 20 bp, Artificial Sequence
  Synthetic
ggcactgcggctggaggtgg

SEQ ID NO: 2935 - DNA, 20 bp, Artificial Sequence
  Synthetic
ggcactgcggctggaggtgg

SEQ ID NO: 2936 - DNA, 20 bp, Artificial Sequence
  Synthetic
ggcactgcggctggaggtgg

SEQ ID NO: 2937 - DNA, 20 bp, Artificial Sequence
  Synthetic
ggcccagactgagcacgtga

SEQ ID NO: 2938 - DNA, 20 bp, Artificial Sequence
  Synthetic
ggcccagactgagcacgtga

SEQ ID NO: 2939 - DNA, 20 bp, Artificial Sequence
  Synthetic
ggcccagactgagcacgtga

SEQ ID NO: 2940 - DNA, 20 bp, Artificial Sequence
  Synthetic
ggcccagactgagcacgtga

SEQ ID NO: 2941 - DNA, 20 bp, Artificial Sequence
  Synthetic
ggcccagactgagcacgtga

SEQ ID NO: 2942 - DNA, 20 bp, Artificial Sequence
  Synthetic
ggcccagactgagcacgtga

SEQ ID NO: 2943 - DNA, 20 bp, Artificial Sequence
  Synthetic
ggcccagactgagcacgtga

SEQ ID NO: 2944 - DNA, 20 bp, Artificial Sequence
  Synthetic
ggcccagactgagcacgtga

SEQ ID NO: 2945 - DNA, 20 bp, Artificial Sequence
  Synthetic
ggcccagactgagcacgtga

SEQ ID NO: 2946 - DNA, 20 bp, Artificial Sequence
  Synthetic
ggcccagactgagcacgtga

SEQ ID NO: 2947 - DNA, 20 bp, Artificial Sequence
  Synthetic
ggcccagactgagcacgtga

SEQ ID NO: 2948 - DNA, 20 bp, Artificial Sequence
  Synthetic
ggcccagactgagcacgtga

SEQ ID NO: 2949 - DNA, 20 bp, Artificial Sequence
  Synthetic
ggcccagactgagcacgtga

SEQ ID NO: 2950 - DNA, 20 bp, Artificial Sequence
  Synthetic
ggcccagactgagcacgtga

SEQ ID NO: 2951 - DNA, 20 bp, Artificial Sequence
  Synthetic
gagtccgagcagaagaagaa

SEQ ID NO: 2952 - DNA, 20 bp, Artificial Sequence
  Synthetic
gagtccgagcagaagaagaa

SEQ ID NO: 2953 - DNA, 20 bp, Artificial Sequence
  Synthetic
gagtccgagcagaagaagaa

SEQ ID NO: 2954 - DNA, 20 bp, Artificial Sequence
  Synthetic
gagtccgagcagaagaagaa

SEQ ID NO: 2955 - DNA, 20 bp, Artificial Sequence
  Synthetic
gagtccgagcagaagaagaa

SEQ ID NO: 2956 - DNA, 20 bp, Artificial Sequence
  Synthetic
gagtccgagcagaagaagaa

SEQ ID NO: 2957 - DNA, 20 bp, Artificial Sequence
  Synthetic
gagtccgagcagaagaagaa

SEQ ID NO: 2958 - DNA, 20 bp, Artificial Sequence
  Synthetic
gagtccgagcagaagaagaa

SEQ ID NO: 2959 - DNA, 20 bp, Artificial Sequence
  Synthetic
gagtccgagcagaagaagaa

SEQ ID NO: 2960 - DNA, 20 bp, Artificial Sequence
  Synthetic
gagtccgagcagaagaagaa

SEQ ID NO: 2961 - DNA, 20 bp, Artificial Sequence
  Synthetic
gagtccgagcagaagaagaa

SEQ ID NO: 2962 - DNA, 20 bp, Artificial Sequence
  Synthetic
ggaatcccttctgcagcacc

SEQ ID NO: 2963 - DNA, 20 bp, Artificial Sequence
  Synthetic
ggaatcccttctgcagcacc

SEQ ID NO: 2964 - DNA, 20 bp, Artificial Sequence
  Synthetic
ggaatcccttctgcagcacc

SEQ ID NO: 2965 - DNA, 20 bp, Artificial Sequence
  Synthetic
ggaatcccttctgcagcacc

SEQ ID NO: 2966 - DNA, 20 bp, Artificial Sequence
  Synthetic
ggaatcccttctgcagcacc

SEQ ID NO: 2967 - DNA, 20 bp, Artificial Sequence
  Synthetic
ggaatcccttctgcagcacc

SEQ ID NO: 2968 - DNA, 20 bp, Artificial Sequence
  Synthetic
ggaatcccttctgcagcacc

SEQ ID NO: 2969 - DNA, 20 bp, Artificial Sequence
  Synthetic
ggaatcccttctgcagcacc

SEQ ID NO: 2970 - DNA, 20 bp, Artificial Sequence
  Synthetic
ggaatcccttctgcagcacc

SEQ ID NO: 2971 - DNA, 20 bp, Artificial Sequence
  Synthetic
ggaatcccttctgcagcacc

SEQ ID NO: 2972 - DNA, 20 bp, Artificial Sequence
  Synthetic
ggaatcccttctgcagcacc

SEQ ID NO: 2973 - DNA, 20 bp, Artificial Sequence
  Synthetic
gtcatcttagtcattacctg

SEQ ID NO: 2974 - DNA, 20 bp, Artificial Sequence
  Synthetic
gtcatcttagtcattacctg

SEQ ID NO: 2975 - DNA, 20 bp, Artificial Sequence
  Synthetic
gtcatcttagtcattacctg

SEQ ID NO: 2976 - DNA, 20 bp, Artificial Sequence
  Synthetic
gtcatcttagtcattacctg

SEQ ID NO: 2977 - DNA, 20 bp, Artificial Sequence
  Synthetic
gtcatcttagtcattacctg

SEQ ID NO: 2978 - DNA, 20 bp, Artificial Sequence
  Synthetic
gtcatcttagtcattacctg

SEQ ID NO: 2979 - DNA, 20 bp, Artificial Sequence
  Synthetic
gtcatcttagtcattacctg

SEQ ID NO: 2980 - DNA, 20 bp, Artificial Sequence
  Synthetic
gtcatcttagtcattacctg

SEQ ID NO: 2981 - DNA, 20 bp, Artificial Sequence
  Synthetic
gtcatcttagtcattacctg

SEQ ID NO: 2982 - DNA, 20 bp, Artificial Sequence
  Synthetic
gtcatcttagtcattacctg

SEQ ID NO: 2983 - DNA, 20 bp, Artificial Sequence
  Synthetic
gtcatcttagtcattacctg

SEQ ID NO: 2984 - DNA, 20 bp, Artificial Sequence
  Synthetic
ggcactgcggctggaggtgg

SEQ ID NO: 2985 - DNA, 20 bp, Artificial Sequence
  Synthetic
ggcactgcggctggaggtgg

SEQ ID NO: 2986 - DNA, 20 bp, Artificial Sequence
  Synthetic
ggcactgcggctggaggtgg

SEQ ID NO: 2987 - DNA, 20 bp, Artificial Sequence
  Synthetic
ggcactgcggctggaggtgg

SEQ ID NO: 2988 - DNA, 20 bp, Artificial Sequence
  Synthetic
ggcactgcggctggaggtgg

SEQ ID NO: 2989 - DNA, 20 bp, Artificial Sequence
  Synthetic
ggcactgcggctggaggtgg

SEQ ID NO: 2990 - DNA, 20 bp, Artificial Sequence
  Synthetic
ggcactgcggctggaggtgg

SEQ ID NO: 2991 - DNA, 20 bp, Artificial Sequence
  Synthetic
ggcactgcggctggaggtgg

SEQ ID NO: 2992 - DNA, 20 bp, Artificial Sequence
  Synthetic
ggcactgcggctggaggtgg

SEQ ID NO: 2993 - DNA, 20 bp, Artificial Sequence
  Synthetic
ggcactgcggctggaggtgg

SEQ ID NO: 2994 - DNA, 20 bp, Artificial Sequence
  Synthetic
ggcactgcggctggaggtgg

SEQ ID NO: 2995 - DNA, 20 bp, Artificial Sequence
  Synthetic
ggcactgcggctggaggtgg

SEQ ID NO: 2996 - DNA, 20 bp, Artificial Sequence
  Synthetic
ggcactgcggctggaggtgg

SEQ ID NO: 2997 - DNA, 18 bp, Artificial Sequence
  Synthetic
tctgccatctcgtgctca

SEQ ID NO: 2998 - DNA, 19 bp, Artificial Sequence
  Synthetic
tctgccatctcgtgctcag

SEQ ID NO: 2999 - DNA, 20 bp, Artificial Sequence
  Synthetic
tctgccatctcgtgctcagt

SEQ ID NO: 3000 - DNA, 21 bp, Artificial Sequence
  Synthetic
tctgccatctcgtgctcagtc

SEQ ID NO: 3001 - DNA, 22 bp, Artificial Sequence
  Synthetic
tctgccatctcgtgctcagtct

SEQ ID NO: 3002 - DNA, 23 bp, Artificial Sequence
  Synthetic
tctgccatctcgtgctcagtctg

SEQ ID NO: 3003 - DNA, 24 bp, Artificial Sequence
  Synthetic
tctgccatctcgtgctcagtctgg

SEQ ID NO: 3004 - DNA, 25 bp, Artificial Sequence
  Synthetic
tctgccatctcgtgctcagtctggg

SEQ ID NO: 3005 - DNA, 26 bp, Artificial Sequence
  Synthetic
tctgccatctcgtgctcagtctgggc

SEQ ID NO: 3006 - DNA, 27 bp, Artificial Sequence
  Synthetic
tctgccatctcgtgctcagtctgggcc

SEQ ID NO: 3007 - DNA, 22 bp, Artificial Sequence
  Synthetic
atgggagcacttcttcttctgc

SEQ ID NO: 3008 - DNA, 23 bp, Artificial Sequence
  Synthetic
atgggagcacttcttcttctgct

SEQ ID NO: 3009 - DNA, 24 bp, Artificial Sequence
  Synthetic
atgggagcacttcttcttctgctc

SEQ ID NO: 3010 - DNA, 25 bp, Artificial Sequence
  Synthetic
atgggagcacttcttcttctgctcg

SEQ ID NO: 3011 - DNA, 26 bp, Artificial Sequence
  Synthetic
atgggagcacttcttcttctgctcgg

SEQ ID NO: 3012 - DNA, 27 bp, Artificial Sequence
  Synthetic
atgggagcacttcttcttctgctcgga

SEQ ID NO: 3013 - DNA, 28 bp, Artificial Sequence
  Synthetic
atgggagcacttcttcttctgctcggac

SEQ ID NO: 3014 - DNA, 29 bp, Artificial Sequence
  Synthetic
atgggagcacttcttcttctgctcggact

SEQ ID NO: 3015 - DNA, 30 bp, Artificial Sequence
  Synthetic
atgggagcacttcttcttctgctcggactc

SEQ ID NO: 3016 - DNA, 25 bp, Artificial Sequence
  Synthetic
ggaaaagcgatcaaggtgctgcaga

SEQ ID NO: 3017 - DNA, 26 bp, Artificial Sequence
  Synthetic
ggaaaagcgatcaaggtgctgcagaa

SEQ ID NO: 3018 - DNA, 27 bp, Artificial Sequence
  Synthetic
ggaaaagcgatcaaggtgctgcagaag

SEQ ID NO: 3019 - DNA, 28 bp, Artificial Sequence
  Synthetic
ggaaaagcgatcaaggtgctgcagaagg

SEQ ID NO: 3020 - DNA, 29 bp, Artificial Sequence
  Synthetic
ggaaaagcgatcaaggtgctgcagaaggg

SEQ ID NO: 3021 - DNA, 30 bp, Artificial Sequence
  Synthetic
ggaaaagcgatcaaggtgctgcagaaggga

SEQ ID NO: 3022 - DNA, 31 bp, Artificial Sequence
  Synthetic
ggaaaagcgatcaaggtgctgcagaagggat

SEQ ID NO: 3023 - DNA, 32 bp, Artificial Sequence
  Synthetic
ggaaaagcgatcaaggtgctgcagaagggatt

SEQ ID NO: 3024 - DNA, 33 bp, Artificial Sequence
  Synthetic
ggaaaagcgatcaaggtgctgcagaagggattc

SEQ ID NO: 3025 - DNA, 34 bp, Artificial Sequence
  Synthetic
ggaaaagcgatcaaggtgctgcagaagggattcc

SEQ ID NO: 3026 - DNA, 20 bp, Artificial Sequence
  Synthetic
gaacacctcatgtaatgact

SEQ ID NO: 3027 - DNA, 21 bp, Artificial Sequence
  Synthetic
gaacacctcatgtaatgacta

SEQ ID NO: 3028 - DNA, 22 bp, Artificial Sequence
  Synthetic
gaacacctcatgtaatgactaa

SEQ ID NO: 3029 - DNA, 23 bp, Artificial Sequence
  Synthetic
gaacacctcatgtaatgactaag

SEQ ID NO: 3030 - DNA, 24 bp, Artificial Sequence
  Synthetic
gaacacctcatgtaatgactaaga

SEQ ID NO: 3031 - DNA, 25 bp, Artificial Sequence
  Synthetic
gaacacctcatgtaatgactaagat

SEQ ID NO: 3032 - DNA, 26 bp, Artificial Sequence
  Synthetic
gaacacctcatgtaatgactaagatg

SEQ ID NO: 3033 - DNA, 27 bp, Artificial Sequence
  Synthetic
gaacacctcatgtaatgactaagatga

SEQ ID NO: 3034 - DNA, 28 bp, Artificial Sequence
  Synthetic
gaacacctcatgtaatgactaagatgac

SEQ ID NO: 3035 - DNA, 20 bp, Artificial Sequence
  Synthetic
gctttaaccccaacctccag

SEQ ID NO: 3036 - DNA, 21 bp, Artificial Sequence
  Synthetic
gctttaaccccaacctccagc

SEQ ID NO: 3037 - DNA, 22 bp, Artificial Sequence
  Synthetic
gctttaaccccaacctccagcc

SEQ ID NO: 3038 - DNA, 23 bp, Artificial Sequence
  Synthetic
gctttaaccccaacctccagccg

SEQ ID NO: 3039 - DNA, 24 bp, Artificial Sequence
  Synthetic
gctttaaccccaacctccagccgc

SEQ ID NO: 3040 - DNA, 25 bp, Artificial Sequence
  Synthetic
gctttaaccccaacctccagccgca

SEQ ID NO: 3041 - DNA, 26 bp, Artificial Sequence
  Synthetic
gctttaaccccaacctccagccgcag

SEQ ID NO: 3042 - DNA, 27 bp, Artificial Sequence
  Synthetic
gctttaaccccaacctccagccgcagt

SEQ ID NO: 3043 - DNA, 28 bp, Artificial Sequence
  Synthetic
gctttaaccccaacctccagccgcagtg

SEQ ID NO: 3044 - DNA, 22 bp, Artificial Sequence
  Synthetic
tctgccatccgtgctcagtctg

SEQ ID NO: 3045 - DNA, 24 bp, Artificial Sequence
  Synthetic
tctgccatcatcgtgctcagtctg

SEQ ID NO: 3046 - DNA, 26 bp, Artificial Sequence
  Synthetic
tctgccatcaaagcgtgctcagtctg

SEQ ID NO: 3047 - DNA, 23 bp, Artificial Sequence
  Synthetic
tctgccatctcgtgctcagtctg

SEQ ID NO: 3048 - DNA, 24 bp, Artificial Sequence
  Synthetic
ctctgccatctcgtgctcagtctg

SEQ ID NO: 3049 - DNA, 25 bp, Artificial Sequence
  Synthetic
cctctgccatctcgtgctcagtctg

SEQ ID NO: 3050 - DNA, 26 bp, Artificial Sequence
  Synthetic
tcctctgccatctcgtgctcagtctg

SEQ ID NO: 3051 - DNA, 27 bp, Artificial Sequence
  Synthetic
ttcctctgccatctcgtgctcagtctg

SEQ ID NO: 3052 - DNA, 28 bp, Artificial Sequence
  Synthetic
tttcctctgccatctcgtgctcagtctg

SEQ ID NO: 3053 - DNA, 29 bp, Artificial Sequence
  Synthetic
ctttcctctgccatctcgtgctcagtctg

SEQ ID NO: 3054 - DNA, 30 bp, Artificial Sequence
  Synthetic
cctttcctctgccatctcgtgctcagtctg

SEQ ID NO: 3055 - DNA, 31 bp, Artificial Sequence
  Synthetic
tcctttcctctgccatctcgtgctcagtctg

SEQ ID NO: 3056 - DNA, 32 bp, Artificial Sequence
  Synthetic
ttcctttcctctgccatctcgtgctcagtctg

SEQ ID NO: 3057 - DNA, 33 bp, Artificial Sequence
  Synthetic
cttcctttcctctgccatctcgtgctcagtctg

SEQ ID NO: 3058 - DNA, 23 bp, Artificial Sequence
  Synthetic
ggagcccttgttcttctgctcgg

SEQ ID NO: 3059 - DNA, 24 bp, Artificial Sequence
  Synthetic
gggagcccttgttcttctgctcgg

SEQ ID NO: 3060 - DNA, 25 bp, Artificial Sequence
  Synthetic
tgggagcccttgttcttctgctcgg

SEQ ID NO: 3061 - DNA, 26 bp, Artificial Sequence
  Synthetic
atgggagcccttgttcttctgctcgg

SEQ ID NO: 3062 - DNA, 27 bp, Artificial Sequence
  Synthetic
gatgggagcccttgttcttctgctcgg

SEQ ID NO: 3063 - DNA, 28 bp, Artificial Sequence
  Synthetic
tgatgggagcccttgttcttctgctcgg

SEQ ID NO: 3064 - DNA, 29 bp, Artificial Sequence
  Synthetic
gtgatgggagcccttgttcttctgctcgg

SEQ ID NO: 3065 - DNA, 30 bp, Artificial Sequence
  Synthetic
tgtgatgggagcccttgttcttctgctcgg

SEQ ID NO: 3066 - DNA, 31 bp, Artificial Sequence
  Synthetic
atgtgatgggagcccttgttcttctgctcgg

SEQ ID NO: 3067 - DNA, 32 bp, Artificial Sequence
  Synthetic
gatgtgatgggagcccttgttcttctgctcgg

SEQ ID NO: 3068 - DNA, 33 bp, Artificial Sequence
  Synthetic
tgatgtgatgggagcccttgttcttctgctcgg

SEQ ID NO: 3069 - DNA, 23 bp, Artificial Sequence
  Synthetic
cgatcaaggtgctgcagaaggga

SEQ ID NO: 3070 - DNA, 24 bp, Artificial Sequence
  Synthetic
gcgatcaaggtgctgcagaaggga

SEQ ID NO: 3071 - DNA, 25 bp, Artificial Sequence
  Synthetic
agcgatcaaggtgctgcagaaggga

SEQ ID NO: 3072 - DNA, 26 bp, Artificial Sequence
  Synthetic
aagcgatcaaggtgctgcagaaggga

SEQ ID NO: 3073 - DNA, 27 bp, Artificial Sequence
  Synthetic
aaagcgatcaaggtgctgcagaaggga

SEQ ID NO: 3074 - DNA, 28 bp, Artificial Sequence
  Synthetic
aaaagcgatcaaggtgctgcagaaggga

SEQ ID NO: 3075 - DNA, 29 bp, Artificial Sequence
  Synthetic
gaaaagcgatcaaggtgctgcagaaggga

SEQ ID NO: 3076 - DNA, 30 bp, Artificial Sequence; identical to SEQ ID NO: 3021
  Synthetic

SEQ ID NO: 3077 - DNA, 31 bp, Artificial Sequence
  Synthetic
cggaaaagcgatcaaggtgctgcagaaggga

SEQ ID NO: 3078 - DNA, 32 bp, Artificial Sequence
  Synthetic
tcggaaaagcgatcaaggtgctgcagaaggga

SEQ ID NO: 3079 - DNA, 33 bp, Artificial Sequence
  Synthetic
ctcggaaaagcgatcaaggtgctgcagaaggga

SEQ ID NO: 3080 - DNA, 25 bp, Artificial Sequence
  Synthetic
aacacctcatgtaatgactaagatg

SEQ ID NO: 3081 - DNA, 26 bp, Artificial Sequence
  Synthetic
gaacacctcatgtaatgactaagatg

SEQ ID NO: 3082 - DNA, 27 bp, Artificial Sequence
  Synthetic
cgaacacctcatgtaatgactaagatg

SEQ ID NO: 3083 - DNA, 28 bp, Artificial Sequence
  Synthetic
acgaacacctcatgtaatgactaagatg

SEQ ID NO: 3084 - DNA, 29 bp, Artificial Sequence
  Synthetic
aacgaacacctcatgtaatgactaagatg

SEQ ID NO: 3085 - DNA, 30 bp, Artificial Sequence
  Synthetic
caacgaacacctcatgtaatgactaagatg

SEQ ID NO: 3086 - DNA, 31 bp, Artificial Sequence
  Synthetic
acaacgaacacctcatgtaatgactaagatg

SEQ ID NO: 3087 - DNA, 32 bp, Artificial Sequence
  Synthetic
tacaacgaacacctcatgtaatgactaagatg

SEQ ID NO: 3088 - DNA, 33 bp, Artificial Sequence
  Synthetic
ttacaacgaacacctcatgtaatgactaagatg

SEQ ID NO: 3089 - DNA, 34 bp, Artificial Sequence
  Synthetic
gttacaacgaacacctcatgtaatgactaagatg

SEQ ID NO: 3090 - DNA, 35 bp, Artificial Sequence
  Synthetic
agttacaacgaacacctcatgtaatgactaagatg

SEQ ID NO: 3091 - DNA, 18 bp, Artificial Sequence
  Synthetic
accccaacctccagccgc

SEQ ID NO: 3092 - DNA, 19 bp, Artificial Sequence
  Synthetic
aaccccaacctccagccgc

SEQ ID NO: 3093 - DNA, 20 bp, Artificial Sequence
  Synthetic
taaccccaacctccagccgc

SEQ ID NO: 3094 - DNA, 21 bp, Artificial Sequence
  Synthetic
ttaaccccaacctccagccgc

SEQ ID NO: 3095 - DNA, 22 bp, Artificial Sequence
  Synthetic
tttaaccccaacctccagccgc

SEQ ID NO: 3096 - DNA, 23 bp, Artificial Sequence
  Synthetic
ctttaaccccaacctccagccgc

SEQ ID NO: 3097 - DNA, 24 bp, Artificial Sequence
  Synthetic
gctttaaccccaacctccagccgc

SEQ ID NO: 3098 - DNA, 25 bp, Artificial Sequence
  Synthetic
cgctttaaccccaacctccagccgc

SEQ ID NO: 3099 - DNA, 26 bp, Artificial Sequence
  Synthetic
ccgctttaaccccaacctccagccgc

SEQ ID NO: 3100 - DNA, 27 bp, Artificial Sequence
  Synthetic
tccgctttaaccccaacctccagccgc

SEQ ID NO: 3101 - DNA, 28 bp, Artificial Sequence
  Synthetic
ctccgctttaaccccaacctccagccgc

SEQ ID NO: 3102 - DNA, 28 bp, Artificial Sequence
  Synthetic
ctccgctttaaccccaacctccagccgc

SEQ ID NO: 3103 - DNA, 28 bp, Artificial Sequence
  Synthetic
ctccgctttaaccccaacctccagccgc

SEQ ID NO: 3104 - DNA, 20 bp, Artificial Sequence
  Synthetic
gtcatcttagtcattacctg

SEQ ID NO: 3105 - DNA, 20 bp, Artificial Sequence
  Synthetic
gagtccgagcagaagaagaa

SEQ ID NO: 3106 - DNA, 20 bp, Artificial Sequence
  Synthetic
ggaatcccttctgcagcacc

SEQ ID NO: 3107 - DNA, 20 bp, Artificial Sequence
  Synthetic
ggcccagactgagcacgtga

SEQ ID NO: 3108 - DNA, 20 bp, Artificial Sequence
  Synthetic
ggcactgcggctggaggtgg

SEQ ID NO: 3109 - DNA, 20 bp, Artificial Sequence
  Synthetic
gtcatcttagtcattacctg

SEQ ID NO: 3110 - DNA, 20 bp, Artificial Sequence
  Synthetic
gtcatcttagtcattacctg

SEQ ID NO: 3111 - DNA, 20 bp, Artificial Sequence
  Synthetic
ggaatcccttctgcagcacc

SEQ ID NO: 3112 - DNA, 20 bp, Artificial Sequence
  Synthetic
ggaatcccttctgcagcacc

SEQ ID NO: 3113 - DNA, 29 bp, Artificial Sequence
  Synthetic
aacgaacacctcatgtaatgactaagatg

SEQ ID NO: 3114 - DNA, 28 bp, Artificial Sequence
  Synthetic
atgggagcacttcttcttctgctcggac

SEQ ID NO: 3115 - DNA, 32 bp, Artificial Sequence; identical to SEQ ID NO: 3023
  Synthetic

SEQ ID NO: 3116 - DNA, 23 bp, Artificial Sequence
  Synthetic
tctgccatgacgtgctcagtctg

SEQ ID NO: 3117 - DNA, 19 bp, Artificial Sequence
  Synthetic
ttaaccccaacctccagcc

SEQ ID NO: 3118 - DNA, 29 bp, Artificial Sequence
  Synthetic
aacgaacaccgcaggtaatgactaagatg

SEQ ID NO: 3119 - DNA, 29 bp, Artificial Sequence
  Synthetic
aacgaacaccccaggtaatgactaagatg

SEQ ID NO: 3120 - DNA, 30 bp, Artificial Sequence; identical to SEQ ID NO: 3021
  Synthetic

SEQ ID NO: 3121 - DNA, 31 bp, Artificial Sequence
  Synthetic
ggaaaagcgagccaggtgctgcagaagggat

SEQ ID NO: 3122 - DNA, 21 bp, Artificial Sequence
  Synthetic
gtcaaccattaagcaaaacat

SEQ ID NO: 3123 - DNA, 21 bp, Artificial Sequence
  Synthetic
gtctcaggctgtgcagacaaa

SEQ ID NO: 3124 - DNA, 20 bp, Artificial Sequence
  Synthetic
ggggcacagatgagaaactc

SEQ ID NO: 3125 - DNA, 20 bp, Artificial Sequence
  Synthetic
gccgtttgtactttgtcctc

SEQ ID NO: 3126 - DNA, 20 bp, Artificial Sequence
  Synthetic
gcgccaccggttgatgtgat

SEQ ID NO: 3127 - DNA, 20 bp, Artificial Sequence
  Synthetic
gcttcgtggcaatgcgccac

SEQ ID NO: 3128 - DNA, 20 bp, Artificial Sequence
  Synthetic
gacatcgatgtcctccccat

SEQ ID NO: 3129 - DNA, 21 bp, Artificial Sequence
  Synthetic
gtggttgcccaccctagtcat

SEQ ID NO: 3130 - DNA, 20 bp, Artificial Sequence
  Synthetic
gcgactctctgcgtactgat

SEQ ID NO: 3131 - DNA, 21 bp, Artificial Sequence
  Synthetic
gccctacttccgctttcacct

SEQ ID NO: 3132 - DNA, 20 bp, Artificial Sequence
  Synthetic
ggattccatgaggtgcgcga

SEQ ID NO: 3133 - DNA, 20 bp, Artificial Sequence
  Synthetic
gctgcagaagggattccatg

SEQ ID NO: 3134 - DNA, 20 bp, Artificial Sequence
  Synthetic
gcttgagaccgccagaagct

SEQ ID NO: 3135 - DNA, 20 bp, Artificial Sequence
  Synthetic
ggggtcccaggtgctgacgt

SEQ ID NO: 3136 - DNA, 20 bp, Artificial Sequence
  Synthetic
gcagaaatagactaattgca

SEQ ID NO: 3137 - DNA, 20 bp, Artificial Sequence
  Synthetic
ggattgacccaggccagggc

SEQ ID NO: 3138 - DNA, 20 bp, Artificial Sequence
  Synthetic
gacgccctctggaggaagca

SEQ ID NO: 3139 - DNA, 19 bp, Artificial Sequence
  Synthetic
gctgtcctgcgacgccctc

SEQ ID NO: 3140 - DNA, 20 bp, Artificial Sequence
  Synthetic
gcacatactagcccctgtct

SEQ ID NO: 3141 - DNA, 20 bp, Artificial Sequence
  Synthetic
gtcaaccagtatcccggtgc

SEQ ID NO: 3142 - DNA, 20 bp, Artificial Sequence
  Synthetic
tcccttccttccacccagcc

SEQ ID NO: 3143 - DNA, 20 bp, Artificial Sequence
  Synthetic
ccctgcctgtcatcctgctt

SEQ ID NO: 3144 - DNA, 20 bp, Artificial Sequence
  Synthetic
gcagtgccaccggggcgccg

SEQ ID NO: 3145 - DNA, 20 bp, Artificial Sequence
  Synthetic
gcgggggctcagagagggca

SEQ ID NO: 3146 - DNA, 21 bp, Artificial Sequence
  Synthetic
gagacacacacacaggcctgg

SEQ ID NO: 3147 - DNA, 21 bp, Artificial Sequence
  Synthetic
gtcaaccattaagcaaaacat

SEQ ID NO: 3148 - DNA, 21 bp, Artificial Sequence
  Synthetic
gtgagttacaacgaacaccgc

SEQ ID NO: 3149 - DNA, 21 bp, Artificial Sequence
  Synthetic
gtgagttacaacgaacacccc

SEQ ID NO: 3150 - DNA, 20 bp, Artificial Sequence
  Synthetic
ggggtcccaggtgctgacgt

SEQ ID NO: 3151 - DNA, 20 bp, Artificial Sequence
  Synthetic
gaagctcggaaaagcgatca

SEQ ID NO: 3152 - DNA, 20 bp, Artificial Sequence
  Synthetic
gaagctcggaaaagcgagcc

SEQ ID NO: 3153 - DNA, 20 bp, Artificial Sequence
  Synthetic
gtcaaccagtatcccggtgc

SEQ ID NO: 3154 - DNA, 20 bp, Artificial Sequence
  Synthetic
ggcccagactgagcacgtga

SEQ ID NO: 3155 - DNA, 20 bp, Artificial Sequence
  Synthetic
ggcccagactgagcacgtga

SEQ ID NO: 3156 - DNA, 20 bp, Artificial Sequence
  Synthetic
ggcccagactgagcacgtga

SEQ ID NO: 3157 - DNA, 20 bp, Artificial Sequence
  Synthetic
ggcccagactgagcacgtga

SEQ ID NO: 3158 - DNA, 20 bp, Artificial Sequence
  Synthetic
ggcccagactgagcacgtga

SEQ ID NO: 3159 - DNA, 20 bp, Artificial Sequence
  Synthetic
ggcccagactgagcacgtga

SEQ ID NO: 3160 - DNA, 20 bp, Artificial Sequence
  Synthetic
ggcccagactgagcacgtga

SEQ ID NO: 3161 - DNA, 20 bp, Artificial Sequence
  Synthetic
ggcccagactgagcacgtga

SEQ ID NO: 3162 - DNA, 20 bp, Artificial Sequence
  Synthetic
ggcccagactgagcacgtga

SEQ ID NO: 3163 - DNA, 20 bp, Artificial Sequence
  Synthetic
ggcccagactgagcacgtga

SEQ ID NO: 3164 - DNA, 20 bp, Artificial Sequence
  Synthetic
ggcccagactgagcacgtga

SEQ ID NO: 3165 - DNA, 20 bp, Artificial Sequence
  Synthetic
ggcccagactgagcacgtga

SEQ ID NO: 3166 - DNA, 20 bp, Artificial Sequence
  Synthetic
ggcccagactgagcacgtga

SEQ ID NO: 3167 - DNA, 20 bp, Artificial Sequence
  Synthetic
ggcccagactgagcacgtga

SEQ ID NO: 3168 - DNA, 20 bp, Artificial Sequence
  Synthetic
ggcccagactgagcacgtga

SEQ ID NO: 3169 - DNA, 20 bp, Artificial Sequence
  Synthetic
ggcccagactgagcacgtga

SEQ ID NO: 3170 - DNA, 20 bp, Artificial Sequence
  Synthetic
ggcccagactgagcacgtga

SEQ ID NO: 3171 - DNA, 20 bp, Artificial Sequence
  Synthetic
ggcccagactgagcacgtga

SEQ ID NO: 3172 - DNA, 20 bp, Artificial Sequence
  Synthetic
ggcccagactgagcacgtga

SEQ ID NO: 3173 - DNA, 20 bp, Artificial Sequence
  Synthetic
ggcccagactgagcacgtga

SEQ ID NO: 3174 - DNA, 20 bp, Artificial Sequence
  Synthetic
ggcccagactgagcacgtga

SEQ ID NO: 3175 - DNA, 20 bp, Artificial Sequence
  Synthetic
ggcccagactgagcacgtga

SEQ ID NO: 3176 - DNA, 20 bp, Artificial Sequence
  Synthetic
ggcccagactgagcacgtga

SEQ ID NO: 3177 - DNA, 20 bp, Artificial Sequence
  Synthetic
ggcccagactgagcacgtga

SEQ ID NO: 3178 - DNA, 20 bp, Artificial Sequence
  Synthetic
ggcccagactgagcacgtga

SEQ ID NO: 3179 - DNA, 20 bp, Artificial Sequence
  Synthetic
ggcccagactgagcacgtga

SEQ ID NO: 3180 - DNA, 20 bp, Artificial Sequence
  Synthetic
ggcccagactgagcacgtga

SEQ ID NO: 3181 - DNA, 20 bp, Artificial Sequence
  Synthetic
ggcccagactgagcacgtga

SEQ ID NO: 3182 - DNA, 20 bp, Artificial Sequence
  Synthetic
ggcccagactgagcacgtga

SEQ ID NO: 3183 - DNA, 20 bp, Artificial Sequence
  Synthetic
ggcccagactgagcacgtga

SEQ ID NO: 3184 - DNA, 20 bp, Artificial Sequence
  Synthetic
ggcccagactgagcacgtga

SEQ ID NO: 3185 - DNA, 20 bp, Artificial Sequence
  Synthetic
ggcccagactgagcacgtga

SEQ ID NO: 3186 - DNA, 20 bp, Artificial Sequence
  Synthetic
ggcccagactgagcacgtga

SEQ ID NO: 3187 - DNA, 20 bp, Artificial Sequence
  Synthetic
ggcccagactgagcacgtga

SEQ ID NO: 3188 - DNA, 20 bp, Artificial Sequence
  Synthetic
gtcatcttagtcattacctg

SEQ ID NO: 3189 - DNA, 20 bp, Artificial Sequence
  Synthetic
gtcatcttagtcattacctg

SEQ ID NO: 3190 - DNA, 20 bp, Artificial Sequence
  Synthetic
gtcatcttagtcattacctg

SEQ ID NO: 3191 - DNA, 20 bp, Artificial Sequence
  Synthetic
gtcatcttagtcattacctg

SEQ ID NO: 3192 - DNA, 20 bp, Artificial Sequence
  Synthetic
gtcatcttagtcattacctg

SEQ ID NO: 3193 - DNA, 20 bp, Artificial Sequence
  Synthetic
gtcatcttagtcattacctg

SEQ ID NO: 3194 - DNA, 20 bp, Artificial Sequence
  Synthetic
gtcatcttagtcattacctg

SEQ ID NO: 3195 - DNA, 20 bp, Artificial Sequence
  Synthetic
gtcatcttagtcattacctg

SEQ ID NO: 3196 - DNA, 20 bp, Artificial Sequence
  Synthetic
gtcatcttagtcattacctg

SEQ ID NO: 3197 - DNA, 20 bp, Artificial Sequence
  Synthetic
gtcatcttagtcattacctg

SEQ ID NO: 3198 - DNA, 20 bp, Artificial Sequence
  Synthetic
gtcatcttagtcattacctg

SEQ ID NO: 3199 - DNA, 20 bp, Artificial Sequence
  Synthetic
gtcatcttagtcattacctg

SEQ ID NO: 3200 - DNA, 20 bp, Artificial Sequence
  Synthetic
ggaatcccttctgcagcacc

SEQ ID NO: 3201 - DNA, 20 bp, Artificial Sequence
  Synthetic
ggaatcccttctgcagcacc

SEQ ID NO: 3202 - DNA, 20 bp, Artificial Sequence
  Synthetic
ggaatcccttctgcagcacc

SEQ ID NO: 3203 - DNA, 20 bp, Artificial Sequence
  Synthetic
ggaatcccttctgcagcacc

SEQ ID NO: 3204 - DNA, 20 bp, Artificial Sequence
  Synthetic
ggaatcccttctgcagcacc

SEQ ID NO: 3205 - DNA, 20 bp, Artificial Sequence
  Synthetic
ggaatcccttctgcagcacc

SEQ ID NO: 3206 - DNA, 20 bp, Artificial Sequence
  Synthetic
ggaatcccttctgcagcacc

SEQ ID NO: 3207 - DNA, 20 bp, Artificial Sequence
  Synthetic
ggaatcccttctgcagcacc

SEQ ID NO: 3208 - DNA, 20 bp, Artificial Sequence
  Synthetic
ggaatcccttctgcagcacc

SEQ ID NO: 3209 - DNA, 20 bp, Artificial Sequence
  Synthetic
ggaatcccttctgcagcacc

SEQ ID NO: 3210 - DNA, 20 bp, Artificial Sequence
  Synthetic
ggaatcccttctgcagcacc

SEQ ID NO: 3211 - DNA, 20 bp, Artificial Sequence
  Synthetic
ggaatcccttctgcagcacc

SEQ ID NO: 3212 - DNA, 20 bp, Artificial Sequence
  Synthetic
gagtccgagcagaagaagaa

SEQ ID NO: 3213 - DNA, 20 bp, Artificial Sequence
  Synthetic
gagtccgagcagaagaagaa

SEQ ID NO: 3214 - DNA, 20 bp, Artificial Sequence
  Synthetic
gagtccgagcagaagaagaa

SEQ ID NO: 3215 - DNA, 20 bp, Artificial Sequence
  Synthetic
gagtccgagcagaagaagaa

SEQ ID NO: 3216 - DNA, 20 bp, Artificial Sequence
  Synthetic
gagtccgagcagaagaagaa

SEQ ID NO: 3217 - DNA, 20 bp, Artificial Sequence
  Synthetic
gagtccgagcagaagaagaa

SEQ ID NO: 3218 - DNA, 20 bp, Artificial Sequence
  Synthetic
gagtccgagcagaagaagaa

SEQ ID NO: 3219 - DNA, 20 bp, Artificial Sequence
  Synthetic
gagtccgagcagaagaagaa

SEQ ID NO: 3220 - DNA, 20 bp, Artificial Sequence
  Synthetic
gagtccgagcagaagaagaa

SEQ ID NO: 3221 - DNA, 20 bp, Artificial Sequence
  Synthetic
gagtccgagcagaagaagaa

SEQ ID NO: 3222 - DNA, 20 bp, Artificial Sequence
  Synthetic
gagtccgagcagaagaagaa

SEQ ID NO: 3223 - DNA, 20 bp, Artificial Sequence
  Synthetic
gagtccgagcagaagaagaa

SEQ ID NO: 3224 - DNA, 20 bp, Artificial Sequence
  Synthetic
gcattttcaggaggaagcga

SEQ ID NO: 3225 - DNA, 20 bp, Artificial Sequence
  Synthetic
gcattttcaggaggaagcga

SEQ ID NO: 3226 - DNA, 20 bp, Artificial Sequence
  Synthetic
gcattttcaggaggaagcga

SEQ ID NO: 3227 - DNA, 20 bp, Artificial Sequence
  Synthetic
gcattttcaggaggaagcga

SEQ ID NO: 3228 - DNA, 20 bp, Artificial Sequence
  Synthetic
gcattttcaggaggaagcga

SEQ ID NO: 3229 - DNA, 20 bp, Artificial Sequence
  Synthetic
gcattttcaggaggaagcga

SEQ ID NO: 3230 - DNA, 20 bp, Artificial Sequence
  Synthetic
gcattttcaggaggaagcga

SEQ ID NO: 3231 - DNA, 20 bp, Artificial Sequence
  Synthetic
gcattttcaggaggaagcga

SEQ ID NO: 3232 - DNA, 20 bp, Artificial Sequence
  Synthetic
gcattttcaggaggaagcga

SEQ ID NO: 3233 - DNA, 20 bp, Artificial Sequence
  Synthetic
gcattttcaggaggaagcga

SEQ ID NO: 3234 - DNA, 20 bp, Artificial Sequence
  Synthetic
gcattttcaggaggaagcga

SEQ ID NO: 3235 - DNA, 20 bp, Artificial Sequence
  Synthetic
gcattttcaggaggaagcga

SEQ ID NO: 3236 - DNA, 20 bp, Artificial Sequence
  Synthetic
gatgtctgcaggccagatga

SEQ ID NO: 3237 - DNA, 20 bp, Artificial Sequence
  Synthetic
gatgtctgcaggccagatga

SEQ ID NO: 3238 - DNA, 20 bp, Artificial Sequence
  Synthetic
gatgtctgcaggccagatga

SEQ ID NO: 3239 - DNA, 20 bp, Artificial Sequence
  Synthetic
gatgtctgcaggccagatga

SEQ ID NO: 3240 - DNA, 20 bp, Artificial Sequence
  Synthetic
gatgtctgcaggccagatga

SEQ ID NO: 3241 - DNA, 20 bp, Artificial Sequence
  Synthetic
gatgtctgcaggccagatga

SEQ ID NO: 3242 - DNA, 20 bp, Artificial Sequence
  Synthetic
gatgtctgcaggccagatga

SEQ ID NO: 3243 - DNA, 20 bp, Artificial Sequence
  Synthetic
gatgtctgcaggccagatga

SEQ ID NO: 3244 - DNA, 20 bp, Artificial Sequence
  Synthetic
gatgtctgcaggccagatga

SEQ ID NO: 3245 - DNA, 20 bp, Artificial Sequence
  Synthetic
gatgtctgcaggccagatga

SEQ ID NO: 3246 - DNA, 20 bp, Artificial Sequence
  Synthetic
gatgtctgcaggccagatga

SEQ ID NO: 3247 - DNA, 20 bp, Artificial Sequence
  Synthetic
gatgtctgcaggccagatga

SEQ ID NO: 3248 - DNA, 20 bp, Artificial Sequence
  Synthetic
gattcctggtgccagaaaca

SEQ ID NO: 3249 - DNA, 20 bp, Artificial Sequence
  Synthetic
gattcctggtgccagaaaca

SEQ ID NO: 3250 - DNA, 20 bp, Artificial Sequence
  Synthetic
gattcctggtgccagaaaca

SEQ ID NO: 3251 - DNA, 20 bp, Artificial Sequence
  Synthetic
gattcctggtgccagaaaca

SEQ ID NO: 3252 - DNA, 20 bp, Artificial Sequence
  Synthetic
gattcctggtgccagaaaca

SEQ ID NO: 3253 - DNA, 20 bp, Artificial Sequence
  Synthetic
gattcctggtgccagaaaca

SEQ ID NO: 3254 - DNA, 20 bp, Artificial Sequence
  Synthetic
gattcctggtgccagaaaca

SEQ ID NO: 3255 - DNA, 20 bp, Artificial Sequence
  Synthetic
gattcctggtgccagaaaca

SEQ ID NO: 3256 - DNA, 20 bp, Artificial Sequence
  Synthetic
gattcctggtgccagaaaca

SEQ ID NO: 3257 - DNA, 20 bp, Artificial Sequence
  Synthetic
gattcctggtgccagaaaca

SEQ ID NO: 3258 - DNA, 20 bp, Artificial Sequence
  Synthetic
gattcctggtgccagaaaca

SEQ ID NO: 3259 - DNA, 20 bp, Artificial Sequence
  Synthetic
gattcctggtgccagaaaca

SEQ ID NO: 3260 - DNA, 20 bp, Artificial Sequence
  Synthetic
ggcccagactgagcacgtga

SEQ ID NO: 3261 - DNA, 20 bp, Artificial Sequence
  Synthetic
ggcccagactgagcacgtga

SEQ ID NO: 3262 - DNA, 20 bp, Artificial Sequence
  Synthetic
ggcccagactgagcacgtga

SEQ ID NO: 3263 - DNA, 20 bp, Artificial Sequence
  Synthetic
ggcccagactgagcacgtga

SEQ ID NO: 3264 - DNA, 20 bp, Artificial Sequence
  Synthetic
ggcccagactgagcacgtga

SEQ ID NO: 3265 - DNA, 20 bp, Artificial Sequence
  Synthetic
ggcccagactgagcacgtga

SEQ ID NO: 3266 - DNA, 20 bp, Artificial Sequence
  Synthetic
ggcccagactgagcacgtga

SEQ ID NO: 3267 - DNA, 20 bp, Artificial Sequence
  Synthetic
ggcccagactgagcacgtga

SEQ ID NO: 3268 - DNA, 20 bp, Artificial Sequence
  Synthetic
ggcccagactgagcacgtga

SEQ ID NO: 3269 - DNA, 20 bp, Artificial Sequence
  Synthetic
ggcccagactgagcacgtga

SEQ ID NO: 3270 - DNA, 20 bp, Artificial Sequence
  Synthetic
gtcatcttagtcattacctg

SEQ ID NO: 3271 - DNA, 20 bp, Artificial Sequence
  Synthetic
gtcatcttagtcattacctg

SEQ ID NO: 3272 - DNA, 20 bp, Artificial Sequence
  Synthetic
gtcatcttagtcattacctg

SEQ ID NO: 3273 - DNA, 20 bp, Artificial Sequence
  Synthetic
gtcatcttagtcattacctg

SEQ ID NO: 3274 - DNA, 20 bp, Artificial Sequence
  Synthetic
ggaatcccttctgcagcacc

SEQ ID NO: 3275 - DNA, 20 bp, Artificial Sequence
  Synthetic
ggaatcccttctgcagcacc

SEQ ID NO: 3276 - DNA, 20 bp, Artificial Sequence
  Synthetic
ggaatcccttctgcagcacc

SEQ ID NO: 3277 - DNA, 20 bp, Artificial Sequence
  Synthetic
ggaatcccttctgcagcacc

SEQ ID NO: 3278 - DNA, 20 bp, Artificial Sequence
  Synthetic
gagtccgagcagaagaagaa

SEQ ID NO: 3279 - DNA, 20 bp, Artificial Sequence
  Synthetic
gagtccgagcagaagaagaa

SEQ ID NO: 3280 - DNA, 20 bp, Artificial Sequence
  Synthetic
gagtccgagcagaagaagaa

SEQ ID NO: 3281 - DNA, 20 bp, Artificial Sequence
  Synthetic
gagtccgagcagaagaagaa

SEQ ID NO: 3282 - DNA, 20 bp, Artificial Sequence
  Synthetic
gcattttcaggaggaagcga

SEQ ID NO: 3283 - DNA, 20 bp, Artificial Sequence
  Synthetic
gcattttcaggaggaagcga

SEQ ID NO: 3284 - DNA, 20 bp, Artificial Sequence
  Synthetic
gcattttcaggaggaagcga

SEQ ID NO: 3285 - DNA, 20 bp, Artificial Sequence
  Synthetic
gcattttcaggaggaagcga

SEQ ID NO: 3286 - DNA, 20 bp, Artificial Sequence
  Synthetic
gatgtctgcaggccagatga

SEQ ID NO: 3287 - DNA, 20 bp, Artificial Sequence
  Synthetic
gatgtctgcaggccagatga

SEQ ID NO: 3288 - DNA, 20 bp, Artificial Sequence
  Synthetic
gatgtctgcaggccagatga

SEQ ID NO: 3289 - DNA, 20 bp, Artificial Sequence
  Synthetic
gatgtctgcaggccagatga

SEQ ID NO: 3290 - DNA, 20 bp, Artificial Sequence
  Synthetic
gattcctggtgccagaaaca

SEQ ID NO: 3291 - DNA, 20 bp, Artificial Sequence
  Synthetic
gattcctggtgccagaaaca

SEQ ID NO: 3292 - DNA, 20 bp, Artificial Sequence
  Synthetic
gattcctggtgccagaaaca

SEQ ID NO: 3293 - DNA, 20 bp, Artificial Sequence
  Synthetic
gattcctggtgccagaaaca

SEQ ID NO: 3294 - DNA, 20 bp, Artificial Sequence
  Synthetic
ggcccagactgagcacgtga

SEQ ID NO: 3295 - DNA, 20 bp, Artificial Sequence
  Synthetic
ggcccagactgagcacgtga

SEQ ID NO: 3296 - DNA, 20 bp, Artificial Sequence
  Synthetic
ggcccagactgagcacgtga

SEQ ID NO: 3297 - DNA, 20 bp, Artificial Sequence
  Synthetic
ggcccagactgagcacgtga

SEQ ID NO: 3298 - DNA, 20 bp, Artificial Sequence
  Synthetic
gtcatcttagtcattacctg

SEQ ID NO: 3299 - DNA, 20 bp, Artificial Sequence
  Synthetic
gtcatcttagtcattacctg

SEQ ID NO: 3300 - DNA, 20 bp, Artificial Sequence
  Synthetic
gtcatcttagtcattacctg

SEQ ID NO: 3301 - DNA, 20 bp, Artificial Sequence
  Synthetic
gtcatcttagtcattacctg

SEQ ID NO: 3302 - DNA, 20 bp, Artificial Sequence
  Synthetic
ggaatcccttctgcagcacc

SEQ ID NO: 3303 - DNA, 20 bp, Artificial Sequence
  Synthetic
ggaatcccttctgcagcacc

SEQ ID NO: 3304 - DNA, 20 bp, Artificial Sequence
  Synthetic
ggaatcccttctgcagcacc

SEQ ID NO: 3305 - DNA, 23 bp, Artificial Sequence
  Synthetic
tctgccatctcgtgctcagtctg

SEQ ID NO: 3306 - DNA, 23 bp, Artificial Sequence
  Synthetic
tctgccatcgcgtgctcagtctg

SEQ ID NO: 3307 - DNA, 23 bp, Artificial Sequence
  Synthetic
tctgccatcccgtgctcagtctg

SEQ ID NO: 3308 - DNA, 23 bp, Artificial Sequence
  Synthetic
tctgccattacgtgctcagtctg

SEQ ID NO: 3309 - DNA, 23 bp, Artificial Sequence
  Synthetic
tctgccatgacgtgctcagtctg

SEQ ID NO: 3310 - DNA, 23 bp, Artificial Sequence
  Synthetic
tctgccataacgtgctcagtctg

SEQ ID NO: 3311 - DNA, 23 bp, Artificial Sequence
  Synthetic
tctgccagcacgtgctcagtctg

SEQ ID NO: 3312 - DNA, 23 bp, Artificial Sequence
  Synthetic
tctgccaccacgtgctcagtctg

SEQ ID NO: 3313 - DNA, 23 bp, Artificial Sequence
  Synthetic
tctgccaacacgtgctcagtctg

SEQ ID NO: 3314 - DNA, 23 bp, Artificial Sequence
  Synthetic
tctgccttcacgtgctcagtctg

SEQ ID NO: 3315 - DNA, 23 bp, Artificial Sequence
  Synthetic
tctgccgtcacgtgctcagtctg

SEQ ID NO: 3316 - DNA, 23 bp, Artificial Sequence
  Synthetic
tctgccctcacgtgctcagtctg

SEQ ID NO: 3317 - DNA, 23 bp, Artificial Sequence
  Synthetic
tctgctatcacgtgctcagtctg

SEQ ID NO: 3318 - DNA, 23 bp, Artificial Sequence
  Synthetic
tctgcgatcacgtgctcagtctg

SEQ ID NO: 3319 - DNA, 23 bp, Artificial Sequence
  Synthetic
tctgcaatcacgtgctcagtctg

SEQ ID NO: 3320 - DNA, 23 bp, Artificial Sequence
  Synthetic
tctgtcatcacgtgctcagtctg

SEQ ID NO: 3321 - DNA, 23 bp, Artificial Sequence
  Synthetic
tctggcatcacgtgctcagtctg

SEQ ID NO: 3322 - DNA, 23 bp, Artificial Sequence
  Synthetic
tctgacatcacgtgctcagtctg

SEQ ID NO: 3323 - DNA, 23 bp, Artificial Sequence
  Synthetic
tcttccatcacgtgctcagtctg

SEQ ID NO: 3324 - DNA, 23 bp, Artificial Sequence
  Synthetic
tctcccatcacgtgctcagtctg

SEQ ID NO: 3325 - DNA, 23 bp, Artificial Sequence
  Synthetic
tctaccatcacgtgctcagtctg

SEQ ID NO: 3326 - DNA, 23 bp, Artificial Sequence
  Synthetic
tcggccatcacgtgctcagtctg

SEQ ID NO: 3327 - DNA, 23 bp, Artificial Sequence
  Synthetic
tccgccatcacgtgctcagtctg

SEQ ID NO: 3328 - DNA, 23 bp, Artificial Sequence
  Synthetic
tcagccatcacgtgctcagtctg

SEQ ID NO: 3329 - DNA, 47 bp, Artificial Sequence
  Synthetic
tggaggaagcagggcttcctttcctctgccatctcgtgctcagtctg

SEQ ID NO: 3330 - DNA, 47 bp, Artificial Sequence
  Synthetic
tggaggaagcagggcttcctttgctctgccatcacgtgctcagtctg

SEQ ID NO: 3331 - DNA, 47 bp, Artificial Sequence
  Synthetic
tggaggaagcagggcttcctatcctctgccatcacgtgctcagtctg

SEQ ID NO: 3332 - DNA, 47 bp, Artificial Sequence
  Synthetic
tggaggaagcagggcttgctttcctctgccatcacgtgctcagtctg

SEQ ID NO: 3333 - DNA, 47 bp, Artificial Sequence
  Synthetic
tggaggaagcaggggttcctttcctctgccatcacgtgctcagtctg

SEQ ID NO: 3334 - DNA, 47 bp, Artificial Sequence
  Synthetic
tggaggaagcacggcttcctttcctctgccatcacgtgctcagtctg

SEQ ID NO: 3335 - DNA, 47 bp, Artificial Sequence
  Synthetic
tggaggaagctgggcttcctttcctctgccatcacgtgctcagtctg

SEQ ID NO: 3336 - DNA, 47 bp, Artificial Sequence
  Synthetic
tggaggaaccagggcttcctttcctctgccatcacgtgctcagtctg

SEQ ID NO: 3337 - DNA, 47 bp, Artificial Sequence
  Synthetic
tggacgaagcagggcttcctttcctctgccatcacgtgctcagtctg

SEQ ID NO: 3338 - DNA, 47 bp, Artificial Sequence
  Synthetic
tcgaggaagcagggcttcctttcctctgccatcacgtgctcagtctg

SEQ ID NO: 3339 - DNA, 29 bp, Artificial Sequence
  Synthetic
aacgaacacctcatgtaatgactaagatg

SEQ ID NO: 3340 - DNA, 29 bp, Artificial Sequence
  Synthetic
aacgaacacctcacgtaatgactaagatg

SEQ ID NO: 3341 - DNA, 29 bp, Artificial Sequence
  Synthetic
aacgaacacctcaagtaatgactaagatg

SEQ ID NO: 3342 - DNA, 29 bp, Artificial Sequence
  Synthetic
aacgaacacctctggtaatgactaagatg

SEQ ID NO: 3343 - DNA, 29 bp, Artificial Sequence
  Synthetic
aacgaacacctccggtaatgactaagatg

SEQ ID NO: 3344 - DNA, 29 bp, Artificial Sequence
  Synthetic
aacgaacacctgaggtaatgactaagatg

SEQ ID NO: 3345 - DNA, 29 bp, Artificial Sequence
  Synthetic
aacgaacaccgcaggtaatgactaagatg

SEQ ID NO: 3346 - DNA, 29 bp, Artificial Sequence
  Synthetic
aacgaacaccacaggtaatgactaagatg

SEQ ID NO: 3347 - DNA, 29 bp, Artificial Sequence
  Synthetic
aacgaacaccccaggtaatgactaagatg

SEQ ID NO: 3348 - DNA, 29 bp, Artificial Sequence
  Synthetic
aacgaacacatcaggtaatgactaagatg

SEQ ID NO: 3349 - DNA, 29 bp, Artificial Sequence
  Synthetic
aacgaacatctcaggtaatgactaagatg

SEQ ID NO: 3350 - DNA, 29 bp, Artificial Sequence
  Synthetic
aacgaacgcctcaggtaatgactaagatg

SEQ ID NO: 3351 - DNA, 31 bp, Artificial Sequence; identical to SEQ ID NO: 691
  Synthetic

SEQ ID NO: 3352 - DNA, 31 bp, Artificial Sequence
  Synthetic
ggaaaagcgatccaggagctgcagaagggat

SEQ ID NO: 3353 - DNA, 31 bp, Artificial Sequence
  Synthetic
ggaaaagcgatccagttgctgcagaagggat

SEQ ID NO: 3354 - DNA, 31 bp, Artificial Sequence
  Synthetic
ggaaaagcgatccacgtgctgcagaagggat

SEQ ID NO: 3355 - DNA, 31 bp, Artificial Sequence
  Synthetic
ggaaaagcgatccaagtgctgcagaagggat

SEQ ID NO: 3356 - DNA, 31 bp, Artificial Sequence
  Synthetic
ggaaaagcgatcctggtgctgcagaagggat

SEQ ID NO: 3357 - DNA, 31 bp, Artificial Sequence
  Synthetic
ggaaaagcgatcccggtgctgcagaagggat

SEQ ID NO: 3358 - DNA, 31 bp, Artificial Sequence
  Synthetic
ggaaaagcgatctaggtgctgcagaagggat

SEQ ID NO: 3359 - DNA, 31 bp, Artificial Sequence; identical to SEQ ID NO: 690
  Synthetic

SEQ ID NO: 3360 - DNA, 31 bp, Artificial Sequence; identical to SEQ ID NO: 3121
  Synthetic

SEQ ID NO: 3361 - DNA, 31 bp, Artificial Sequence
  Synthetic
ggaaaagcggtccaggtgctgcagaagggat

SEQ ID NO: 3362 - DNA, 31 bp, Artificial Sequence
  Synthetic
ggaaaagagatccaggtgctgcagaagggat

SEQ ID NO: 3363 - DNA, 30 bp, Artificial Sequence; identical to SEQ ID NO: 687
  Synthetic

SEQ ID NO: 3364 - DNA, 30 bp, Artificial Sequence
  Synthetic
gtgatgggagccctacttcttctgctcgga

SEQ ID NO: 3365 - DNA, 30 bp, Artificial Sequence
  Synthetic
gtgatgggagcccctcttcttctgctcgga

SEQ ID NO: 3366 - DNA, 30 bp, Artificial Sequence
  Synthetic
gtgatgggagccgttcttcttctgctcgga

SEQ ID NO: 3367 - DNA, 30 bp, Artificial Sequence
  Synthetic
gtgatgggagctcttcttcttctgctcgga

SEQ ID NO: 3368 - DNA, 30 bp, Artificial Sequence; identical to SEQ ID NO: 686
  Synthetic

SEQ ID NO: 3369 - DNA, 30 bp, Artificial Sequence
  Synthetic
gtgatgggatcccttcttcttctgctcgga

SEQ ID NO: 3370 - DNA, 30 bp, Artificial Sequence
  Synthetic
gtgatgggtgcccttcttcttctgctcgga

SEQ ID NO: 3371 - DNA, 30 bp, Artificial Sequence
  Synthetic
gtgatgggggcccttcttcttctgctcgga

SEQ ID NO: 3372 - DNA, 30 bp, Artificial Sequence
  Synthetic
gtgatgggcgcccttcttcttctgctcgga

SEQ ID NO: 3373 - DNA, 30 bp, Artificial Sequence
  Synthetic
gtgatggcagcccttcttcttctgctcgga

SEQ ID NO: 3374 - DNA, 30 bp, Artificial Sequence
  Synthetic
gtgatggaagcccttcttcttctgctcgga

SEQ ID NO: 3375 - DNA, 30 bp, Artificial Sequence
  Synthetic
tgtctgaagccatctcttcctcctgaaaat

SEQ ID NO: 3376 - DNA, 30 bp, Artificial Sequence
  Synthetic
tgtctgaagccatcccttcctcctgaaaat

SEQ ID NO: 3377 - DNA, 30 bp, Artificial Sequence
  Synthetic
tgtctgaagccatcacttcctcctgaaaat

SEQ ID NO: 3378 - DNA, 30 bp, Artificial Sequence
  Synthetic
tgtctgaagccattgcttcctcctgaaaat

SEQ ID NO: 3379 - DNA, 30 bp, Artificial Sequence
  Synthetic
tgtctgaagccagcgcttcctcctgaaaat

SEQ ID NO: 3380 - DNA, 30 bp, Artificial Sequence
  Synthetic
tgtctgaagccaccgcttcctcctgaaaat

SEQ ID NO: 3381 - DNA, 30 bp, Artificial Sequence
  Synthetic
tgtctgaagccaacgcttcctcctgaaaat

SEQ ID NO: 3382 - DNA, 30 bp, Artificial Sequence
  Synthetic
tgtctgaagccttcgcttcctcctgaaaat

SEQ ID NO: 3383 - DNA, 30 bp, Artificial Sequence
  Synthetic
tgtctgaagccgtcgcttcctcctgaaaat

SEQ ID NO: 3384 - DNA, 30 bp, Artificial Sequence
  Synthetic
tgtctgaagccctcgcttcctcctgaaaat

SEQ ID NO: 3385 - DNA, 30 bp, Artificial Sequence
  Synthetic
tgtctgaagcaatcgcttcctcctgaaaat

SEQ ID NO: 3386 - DNA, 30 bp, Artificial Sequence
  Synthetic
tgtctgaaggcatcgcttcctcctgaaaat

SEQ ID NO: 3387 - DNA, 35 bp, Artificial Sequence
  Synthetic
aatgtgccatctggagccctcttctggcctgcaga

SEQ ID NO: 3388 - DNA, 35 bp, Artificial Sequence
  Synthetic
aatgtgccatctggagccctcgtctggcctgcaga

SEQ ID NO: 3389 - DNA, 35 bp, Artificial Sequence
  Synthetic
aatgtgccatctggagccctcctctggcctgcaga

SEQ ID NO: 3390 - DNA, 35 bp, Artificial Sequence
  Synthetic
aatgtgccatctggagcccttatctggcctgcaga

SEQ ID NO: 3391 - DNA, 35 bp, Artificial Sequence
  Synthetic
aatgtgccatctggagcccgcatctggcctgcaga

SEQ ID NO: 3392 - DNA, 35 bp, Artificial Sequence
  Synthetic
aatgtgccatctggagcccccatctggcctgcaga

SEQ ID NO: 3393 - DNA, 35 bp, Artificial Sequence
  Synthetic
aatgtgccatctggagcccacatctggcctgcaga

SEQ ID NO: 3394 - DNA, 35 bp, Artificial Sequence
  Synthetic
aatgtgccatctggagcactcatctggcctgcaga

SEQ ID NO: 3395 - DNA, 35 bp, Artificial Sequence
  Synthetic
aatgtgccatctggaggcctcatctggcctgcaga

SEQ ID NO: 3396 - DNA, 35 bp, Artificial Sequence
  Synthetic
aatgtgccatctggatccctcatctggcctgcaga

SEQ ID NO: 3397 - DNA, 35 bp, Artificial Sequence
  Synthetic
aatgtgccatctggaaccctcatctggcctgcaga

SEQ ID NO: 3398 - DNA, 35 bp, Artificial Sequence
  Synthetic
aatgtgccatctgcagccctcatctggcctgcaga

SEQ ID NO: 3399 - DNA, 24 bp, Artificial Sequence
  Synthetic
gtcacccctggttctggcaccagg

SEQ ID NO: 3400 - DNA, 24 bp, Artificial Sequence
  Synthetic
gtcacccctgcttctggcaccagg

SEQ ID NO: 3401 - DNA, 24 bp, Artificial Sequence
  Synthetic
gtcacccctttttctggcaccagg

SEQ ID NO: 3402 - DNA, 24 bp, Artificial Sequence
  Synthetic
gtcacccctctttctggcaccagg

SEQ ID NO: 3403 - DNA, 24 bp, Artificial Sequence
  Synthetic
gtcacccctatttctggcaccagg

SEQ ID NO: 3404 - DNA, 24 bp, Artificial Sequence
  Synthetic
gtcaccccagtttctggcaccagg

SEQ ID NO: 3405 - DNA, 24 bp, Artificial Sequence
  Synthetic
gtcacccttgtttctggcaccagg

SEQ ID NO: 3406 - DNA, 24 bp, Artificial Sequence
  Synthetic
gtcaccactgtttctggcaccagg

SEQ ID NO: 3407 - DNA, 24 bp, Artificial Sequence
  Synthetic
gtcacgcctgtttctggcaccagg

SEQ ID NO: 3408 - DNA, 32 bp, Artificial Sequence
  Synthetic
gccctcccgtctcccctgtttctggcaccagg

SEQ ID NO: 3409 - DNA, 32 bp, Artificial Sequence
  Synthetic
gccctcccgtcgcccctgtttctggcaccagg

SEQ ID NO: 3410 - DNA, 32 bp, Artificial Sequence
  Synthetic
gccctcccgtcccccctgtttctggcaccagg

SEQ ID NO: 3411 - DNA, 42 bp, Artificial Sequence
  Synthetic
tggaggaagcagggcttcctttcctctgccgtgctcagtctg

SEQ ID NO: 3412 - DNA, 37 bp, Artificial Sequence
  Synthetic
tggaggaagcagggcttcctttcccgtgctcagtctg

SEQ ID NO: 3413 - DNA, 32 bp, Artificial Sequence
  Synthetic
tggaggaagcagggcttcccgtgctcagtctg

SEQ ID NO: 3414 - DNA, 39 bp, Artificial Sequence
  Synthetic
tgtcctgcgacgccctctggaggaagcgtgctcagtctg

SEQ ID NO: 3415 - DNA, 34 bp, Artificial Sequence
  Synthetic
tgtcctgcgacgccctctggacgtgctcagtctg

SEQ ID NO: 3416 - DNA, 33 bp, Artificial Sequence
  Synthetic
agtatcccggtgcaggagctcgtgctcagtctg

SEQ ID NO: 3417 - DNA, 24 bp, Artificial Sequence
  Synthetic
tctgccatcatcgtgctcagtctg

SEQ ID NO: 3418 - DNA, 26 bp, Artificial Sequence
  Synthetic
tctgccatcaaagcgtgctcagtctg

SEQ ID NO: 3419 - DNA, 22 bp, Artificial Sequence
  Synthetic
tctgccatccgtgctcagtctg

SEQ ID NO: 3420 - DNA, 44 bp, Artificial Sequence
  Synthetic
tggaggaagcagggcttcctttcctctgccacgtgctcagtctg

SEQ ID NO: 3421 - DNA, 30 bp, Artificial Sequence
  Synthetic
aacgaacacctcagagtaatgactaagatg

SEQ ID NO: 3422 - DNA, 32 bp, Artificial Sequence; identical to SEQ ID NO: 648
  Synthetic

SEQ ID NO: 3423 - DNA, 28 bp, Artificial Sequence
  Synthetic
aacgaacacccaggtaatgactaagatg

SEQ ID NO: 3424 - DNA, 26 bp, Artificial Sequence
  Synthetic
aacgaacacaggtaatgactaagatg

SEQ ID NO: 3425 - DNA, 32 bp, Artificial Sequence
  Synthetic
ggaaaagcgatccagggtgctgcagaagggat

SEQ ID NO: 3426 - DNA, 34 bp, Artificial Sequence; identical to SEQ ID NO: 692
  Synthetic

SEQ ID NO: 3427 - DNA, 30 bp, Artificial Sequence
  Synthetic
ggaaaagcgatcaggtgctgcagaagggat

SEQ ID NO: 3428 - DNA, 28 bp, Artificial Sequence
  Synthetic
ggaaaagcgaaggtgctgcagaagggat

SEQ ID NO: 3429 - DNA, 31 bp, Artificial Sequence
  Synthetic
gtgatgggagcaccttcttcttctgctcgga

SEQ ID NO: 3430 - DNA, 33 bp, Artificial Sequence; identical to SEQ ID NO: 688
  Synthetic

SEQ ID NO: 3431 - DNA, 29 bp, Artificial Sequence
  Synthetic
gtgatgggagccttcttcttctgctcgga

SEQ ID NO: 3432 - DNA, 27 bp, Artificial Sequence
  Synthetic
gtgatgggagttcttcttctgctcgga

SEQ ID NO: 3433 - DNA, 31 bp, Artificial Sequence
  Synthetic
tgtctgaagccatcggcttcctcctgaaaat

SEQ ID NO: 3434 - DNA, 33 bp, Artificial Sequence
  Synthetic
tgtctgaagccatccatgcttcctcctgaaaat

SEQ ID NO: 3435 - DNA, 29 bp, Artificial Sequence
  Synthetic
tgtctgaagccatgcttcctcctgaaaat

SEQ ID NO: 3436 - DNA, 27 bp, Artificial Sequence
  Synthetic
tgtctgaagccgcttcctcctgaaaat

SEQ ID NO: 3437 - DNA, 36 bp, Artificial Sequence
  Synthetic
aatgtgccatctggagccgctcatctggcctgcaga

SEQ ID NO: 3438 - DNA, 38 bp, Artificial Sequence
  Synthetic
aatgtgccatctggagcccttgtcatctggcctgcaga

SEQ ID NO: 3439 - DNA, 34 bp, Artificial Sequence
  Synthetic
aatgtgccatctggagccccatctggcctgcaga

SEQ ID NO: 3440 - DNA, 32 bp, Artificial Sequence
  Synthetic
aatgtgccatctggagccatctggcctgcaga

SEQ ID NO: 3441 - DNA, 29 bp, Artificial Sequence
  Synthetic
tcccgtcacccgctgtttctggcaccagg

SEQ ID NO: 3442 - DNA, 31 bp, Artificial Sequence
  Synthetic
tcccgtcacccctgtgatttctggcaccagg

SEQ ID NO: 3443 - DNA, 27 bp, Artificial Sequence
  Synthetic
tcccgtcaccccgtttctggcaccagg

SEQ ID NO: 3444 - DNA, 25 bp, Artificial Sequence
  Synthetic
tcccgtcaccgtttctggcaccagg

SEQ ID NO: 3445 - DNA, 49 bp, Artificial Sequence
  Synthetic
tggaggaagcagggcttcctttcctctgcatcaaagcgtgctcagtctg

SEQ ID NO: 3446 - DNA, 50 bp, Artificial Sequence
  Synthetic
tggaggaagcagggcttcctttcctctgccatgaaagcgtgctcagtctg

SEQ ID NO: 3447 - DNA, 46 bp, Artificial Sequence
  Synthetic
tggaggaagcagggcttcctttcctctgcgatccgtgctcagtctg

SEQ ID NO: 3448 - DNA, 47 bp, Artificial Sequence
  Synthetic
tggaggaagcagggcttcctttcctctgacatgacgtgctcagtctg

SEQ ID NO: 3449 - DNA, 29 bp, Artificial Sequence
  Synthetic
aacgaacaccattggtaatgactaagatg

SEQ ID NO: 3450 - DNA, 30 bp, Artificial Sequence
  Synthetic
aacgaacacgtcagtgtaatgactaagatg

SEQ ID NO: 3451 - DNA, 27 bp, Artificial Sequence
  Synthetic
aacgaacaactcgtaatgactaagatg

SEQ ID NO: 3452 - DNA, 29 bp, Artificial Sequence
  Synthetic
aacgaacacatcatgtaatgactaagatg

SEQ ID NO: 3453 - DNA, 30 bp, Artificial Sequence
  Synthetic
ggaaaagcgatcggtagctgcagaagggat

SEQ ID NO: 3454 - DNA, 32 bp, Artificial Sequence
  Synthetic
ggaaaagcgattcaggtagctgcagaagggat

SEQ ID NO: 3455 - DNA, 30 bp, Artificial Sequence
  Synthetic
ggaaaagcgatcaagtgctgcagaagggat

SEQ ID NO: 3456 - DNA, 20 bp, Artificial Sequence
  Synthetic
gtcaaccagtatcccggtgc

SEQ ID NO: 3457 - DNA, 20 bp, Artificial Sequence
  Synthetic
gtcaaccagtatcccggtgc

SEQ ID NO: 3458 - DNA, 21 bp, Artificial Sequence
  Synthetic
gtcaaccattaagcaaaacat

SEQ ID NO: 3459 - DNA, 20 bp, Artificial Sequence
  Synthetic
ggggtcccaggtgctgacgt

SEQ ID NO: 3460 - DNA, 20 bp, Artificial Sequence
  Synthetic
gacatcgatgtcctccccat

SEQ ID NO: 3461 - DNA, 21 bp, Artificial Sequence
  Synthetic
gatgaagcactgtgggtacga

SEQ ID NO: 3462 - DNA, 21 bp, Artificial Sequence
  Synthetic
gatgtacagagagcccagggc

SEQ ID NO: 3463 - DNA, 21 bp, Artificial Sequence
  Synthetic
gcccttcagctaaaataaagg

SEQ ID NO: 3464 - DNA, 20 bp, Artificial Sequence
  Synthetic
ggcccagactgagcacgtga

SEQ ID NO: 3465 - DNA, 20 bp, Artificial Sequence
  Synthetic
ggcccagactgagcacgtga

SEQ ID NO: 3466 - DNA, 20 bp, Artificial Sequence
  Synthetic
ggcccagactgagcacgtga

SEQ ID NO: 3467 - DNA, 20 bp, Artificial Sequence
  Synthetic
ggaatcccttctgcagcacc

SEQ ID NO: 3468 - DNA, 20 bp, Artificial Sequence
  Synthetic
ggaatcccttctgcagcacc

SEQ ID NO: 3469 - DNA, 20 bp, Artificial Sequence
  Synthetic
ggaatcccttctgcagcacc

SEQ ID NO: 3470 - DNA, 20 bp, Artificial Sequence
  Synthetic
gagtccgagcagaagaagaa

SEQ ID NO: 3471 - DNA, 20 bp, Artificial Sequence
  Synthetic
gagtccgagcagaagaagaa

SEQ ID NO: 3472 - DNA, 20 bp, Artificial Sequence
  Synthetic
gagtccgagcagaagaagaa

SEQ ID NO: 3473 - DNA, 20 bp, Artificial Sequence
  Synthetic
gagtccgagcagaagaagaa

SEQ ID NO: 3474 - DNA, 20 bp, Artificial Sequence
  Synthetic
gagtccgagcagaagaagaa

SEQ ID NO: 3475 - DNA, 20 bp, Artificial Sequence
  Synthetic
gagtccgagcagaagaagaa

SEQ ID NO: 3476 - DNA, 20 bp, Artificial Sequence
  Synthetic
gagtccgagcagaagaagaa

SEQ ID NO: 3477 - DNA, 20 bp, Artificial Sequence
  Synthetic
ggcccagactgagcacgtga

SEQ ID NO: 3478 - DNA, 20 bp, Artificial Sequence
  Synthetic
ggcccagactgagcacgtga

SEQ ID NO: 3479 - DNA, 23 bp, Artificial Sequence
  Synthetic
tctgtcatcacgtgctcagtctg

SEQ ID NO: 3480 - DNA, 23 bp, Artificial Sequence
  Synthetic
tctgctatcacgtgctcagtctg

SEQ ID NO: 3481 - DNA, 23 bp, Artificial Sequence
  Synthetic
tctgccattacgtgctcagtctg

SEQ ID NO: 3482 - DNA, 31 bp, Artificial Sequence
  Synthetic
ggaaaagtgatccaggtgctgcagaagggat

SEQ ID NO: 3483 - DNA, 31 bp, Artificial Sequence
  Synthetic
ggaaaagcgattcaggtgctgcagaagggat

SEQ ID NO: 3484 - DNA, 31 bp, Artificial Sequence; identical to SEQ ID NO: 3358
  Synthetic

SEQ ID NO: 3485 - DNA, 30 bp, Artificial Sequence
  Synthetic
gtgatgggagtccttcttcttctgctcgga

SEQ ID NO: 3486 - DNA, 30 bp, Artificial Sequence; identical to SEQ ID NO: 3367
  Synthetic

SEQ ID NO: 3487 - DNA, 30 bp, Artificial Sequence
  Synthetic
gtgatgggagcctttcttcttctgctcgga

SEQ ID NO: 3488 - DNA, 30 bp, Artificial Sequence
  Synthetic
gtgatgggagttcttcttcttctgctcgga

SEQ ID NO: 3489 - DNA, 30 bp, Artificial Sequence
  Synthetic
gtgatgggagtctttcttcttctgctcgga

SEQ ID NO: 3490 - DNA, 30 bp, Artificial Sequence
  Synthetic
gtgatgggagcttttcttcttctgctcgga

SEQ ID NO: 3491 - DNA, 30 bp, Artificial Sequence
  Synthetic
gtgatgggagtttttcttcttctgctcgga

SEQ ID NO: 3492 - DNA, 23 bp, Artificial Sequence
  Synthetic
tctgccgtcacgtgctcagtctg

SEQ ID NO: 3493 - DNA, 23 bp, Artificial Sequence
  Synthetic
tctgccatcgcgtgctcagtctg

SEQ ID NO: 3494 - DNA, 20 bp, Artificial Sequence
  Synthetic
ggcccagactgagcacgtga

SEQ ID NO: 3495 - DNA, 20 bp, Artificial Sequence
  Synthetic
ggcccagactgagcacgtga

SEQ ID NO: 3496 - DNA, 20 bp, Artificial Sequence
  Synthetic
gagtccgagcagaagaagaa

SEQ ID NO: 3497 - DNA, 20 bp, Artificial Sequence
  Synthetic
gagtccgagcagaagaagaa

SEQ ID NO: 3498 - DNA, 20 bp, Artificial Sequence
  Synthetic
ggaatcccttctgcagcacc

SEQ ID NO: 3499 - DNA, 20 bp, Artificial Sequence
  Synthetic
ggaatcccttctgcagcacc

SEQ ID NO: 3500 - DNA, 20 bp, Artificial Sequence
  Synthetic
ggcccagactgagcacgtga

SEQ ID NO: 3501 - DNA, 20 bp, Artificial Sequence
  Synthetic
ggcccagactgagcacgtga

SEQ ID NO: 3502 - DNA, 20 bp, Artificial Sequence
  Synthetic
ggcccagactgagcacgtga

SEQ ID NO: 3503 - DNA, 20 bp, Artificial Sequence
  Synthetic
ggcccagactgagcacgtga

SEQ ID NO: 3504 - DNA, 20 bp, Artificial Sequence
  Synthetic
ggcccagactgagcacgtga

SEQ ID NO: 3505 - DNA, 20 bp, Artificial Sequence
  Synthetic
ggcccagactgagcacgtga

SEQ ID NO: 3506 - DNA, 21 bp, Artificial Sequence
  Synthetic
gcatggtgcacctgactcctg

SEQ ID NO: 3507 - DNA, 21 bp, Artificial Sequence
  Synthetic
gcatggtgcacctgactcctg

SEQ ID NO: 3508 - DNA, 21 bp, Artificial Sequence
  Synthetic
gcatggtgcacctgactcctg

SEQ ID NO: 3509 - DNA, 21 bp, Artificial Sequence
  Synthetic
gcatggtgcacctgactcctg

SEQ ID NO: 3510 - DNA, 21 bp, Artificial Sequence
  Synthetic
gcatggtgcacctgactcctg

SEQ ID NO: 3511 - DNA, 21 bp, Artificial Sequence
  Synthetic
gcatggtgcacctgactcctg

SEQ ID NO: 3512 - DNA, 21 bp, Artificial Sequence
  Synthetic
gtacctgaaccgtatatccta

SEQ ID NO: 3513 - DNA, 21 bp, Artificial Sequence
  Synthetic
gatccttccagtcagggccat

SEQ ID NO: 3514 - DNA, 21 bp, Artificial Sequence
  Synthetic
gatccttccagtcagggccat

SEQ ID NO: 3515 - DNA, 20 bp, Artificial Sequence
  Synthetic
gcagtggtggggggccttgg

SEQ ID NO: 3516 - DNA, 20 bp, Artificial Sequence
  Synthetic
ggcccagactgagcacgtga

SEQ ID NO: 3517 - DNA, 20 bp, Artificial Sequence
  Synthetic
ggcccagactgagcacgtga

SEQ ID NO: 3518 - DNA, 20 bp, Artificial Sequence
  Synthetic
gtcatcttagtcattacctg

SEQ ID NO: 3519 - DNA, 21 bp, Artificial Sequence
  Synthetic
gcatggtgcacctgactcctg

SEQ ID NO: 3520 - DNA, 20 bp, Artificial Sequence
  Synthetic
ggcccagactgagcacgtga

SEQ ID NO: 3521 - DNA, 20 bp, Artificial Sequence
  Synthetic
ggcccagactgagcacgtga

SEQ ID NO: 3522 - DNA, 23 bp, Artificial Sequence
  Synthetic
tctgccatgacgtgctcagtctg

SEQ ID NO: 3523 - DNA, 26 bp, Artificial Sequence
  Synthetic
atgggagcccttgttcttctgctcgg

SEQ ID NO: 3524 - DNA, 28 bp, Artificial Sequence
  Synthetic
aaaagcgatcaaggtgctgcagaaggga

SEQ ID NO: 3525 - DNA, 65 bp, Artificial Sequence
  Synthetic
tggaggaagcagggcttcctttcctctgccatcaatgatggtgatgatggtgcgtgctcagtctg

SEQ ID NO: 3526 - DNA, 23 bp, Artificial Sequence
  Synthetic
tctgcaatcacgtgctcagtctg

SEQ ID NO: 3527 - DNA, 26 bp, Artificial Sequence
  Synthetic
tctgccatcaaagcgtgctcagtctg

SEQ ID NO: 3528 - DNA, 27 bp, Artificial Sequence
  Synthetic
agacttctccacaggagtcaggtgcac

SEQ ID NO: 3529 - DNA, 27 bp, Artificial Sequence
  Synthetic
agacttctcctcaggagtcaggtgcac

SEQ ID NO: 3530 - DNA, 27 bp, Artificial Sequence
  Synthetic
agacttctcttcaggagtcaggtgcac

SEQ ID NO: 3531 - DNA, 30 bp, Artificial Sequence
  Synthetic
agtcagggccataggatagatatacggttc

SEQ ID NO: 3532 - DNA, 31 bp, Artificial Sequence
  Synthetic
acctgaaccgtatatcctatggccctgactg

SEQ ID NO: 3533 - DNA, 32 bp, Artificial Sequence
  Synthetic
gtacctgaaccgtatatcttatggccctgact

SEQ ID NO: 3534 - DNA, 24 bp, Artificial Sequence
  Synthetic
atgtagacgccaaggccccccacc

SEQ ID NO: 3535 - DNA, 23 bp, Artificial Sequence
  Synthetic
tctgccatcccgtgctcagtctg

SEQ ID NO: 3536 - DNA, 26 bp, Artificial Sequence
  Synthetic
tctgccatcaaagcgtgctcagtctg

SEQ ID NO: 3537 - DNA, 29 bp, Artificial Sequence
  Synthetic
aacgaacacctcacgtaatgactaagatg

SEQ ID NO: 3538 - DNA, 27 bp, Artificial Sequence
  Synthetic
agacttctccacaggagtcaggtgcac

SEQ ID NO: 3539 - DNA, 65 bp, Artificial Sequence; identical to SEQ ID NO: 3525
  Synthetic

SEQ ID NO: 3540 - DNA, 71 bp, Artificial Sequence
  Synthetic
tggaggaagcagggcttcctttcctctgccatcacttatcgtcgtcatccttgtaatccgtgctcagtctg

SEQ ID NO: 3541 - DNA, 20 bp, Artificial Sequence
  Synthetic
ggcccagactgagcacgtga

SEQ ID NO: 3542 - DNA, 20 bp, Artificial Sequence
  Synthetic
ggcccagactgagcacgtga

SEQ ID NO: 3543 - DNA, 20 bp, Artificial Sequence
  Synthetic
ggcccagactgagcacgtga

SEQ ID NO: 3544 - DNA, 20 bp, Artificial Sequence
  Synthetic
ggcccagactgagcacgtga

SEQ ID NO: 3545 - DNA, 20 bp, Artificial Sequence
  Synthetic
ggcccagactgagcacgtga

SEQ ID NO: 3546 - DNA, 20 bp, Artificial Sequence
  Synthetic
gtcatcttagtcattacctg

SEQ ID NO: 3547 - DNA, 20 bp, Artificial Sequence
  Synthetic
gagtccgagcagaagaagaa

SEQ ID NO: 3548 - DNA, 20 bp, Artificial Sequence
  Synthetic
gtaacggcagacttctcctc

SEQ ID NO: 3549 - DNA, 22 bp, Artificial Sequence
  Synthetic
tctgccatccgtgctcagtctg

SEQ ID NO: 3550 - DNA, 24 bp, Artificial Sequence
  Synthetic
tctgccatcatcgtgctcagtctg

SEQ ID NO: 3551 - DNA, 26 bp, Artificial Sequence
  Synthetic
tctgccatcaaagcgtgctcagtctg

SEQ ID NO: 3552 - DNA, 23 bp, Artificial Sequence
  Synthetic
tctgccatgacgtgctcagtctg

SEQ ID NO: 3553 - DNA, 71 bp, Artificial Sequence; identical to SEQ ID NO: 3540
  Synthetic

SEQ ID NO: 3554 - DNA, 29 bp, Artificial Sequence
  Synthetic
aacgaacacctcatgtaatgactaagatg

SEQ ID NO: 3555 - DNA, 26 bp, Artificial Sequence
  Synthetic
atgggagcccttgttcttctgctcgg

SEQ ID NO: 3556 - DNA, 26 bp, Artificial Sequence
  Synthetic
atctgactcctgtggagaagtctgcc

SEQ ID NO: 3557 - DNA, 20 bp, Artificial Sequence
  Synthetic
gatgtctgcaggccagatga

SEQ ID NO: 3558 - DNA, 20 bp, Artificial Sequence
  Synthetic
gatgtctgcaggccagatga

SEQ ID NO: 3559 - DNA, 20 bp, Artificial Sequence
  Synthetic
gatgtctgcaggccagatga

SEQ ID NO: 3560 - DNA, 20 bp, Artificial Sequence
  Synthetic
gatgtctgcaggccagatga

SEQ ID NO: 3561 - DNA, 20 bp, Artificial Sequence
  Synthetic
gatgtctgcaggccagatga

SEQ ID NO: 3562 - DNA, 20 bp, Artificial Sequence
  Synthetic
gatgtctgcaggccagatga

SEQ ID NO: 3563 - DNA, 20 bp, Artificial Sequence
  Synthetic
gatgtctgcaggccagatga

SEQ ID NO: 3564 - DNA, 20 bp, Artificial Sequence
  Synthetic
gatgtctgcaggccagatga

SEQ ID NO: 3565 - DNA, 20 bp, Artificial Sequence
  Synthetic
gatgtctgcaggccagatga

SEQ ID NO: 3566 - DNA, 20 bp, Artificial Sequence
  Synthetic
gatgtctgcaggccagatga

SEQ ID NO: 3567 - DNA, 20 bp, Artificial Sequence
  Synthetic
gatgtctgcaggccagatga

SEQ ID NO: 3568 - DNA, 20 bp, Artificial Sequence
  Synthetic
gatgtctgcaggccagatga

SEQ ID NO: 3569 - DNA, 20 bp, Artificial Sequence
  Synthetic
gatgtctgcaggccagatga

SEQ ID NO: 3570 - DNA, 20 bp, Artificial Sequence
  Synthetic
gatgtctgcaggccagatga

SEQ ID NO: 3571 - DNA, 20 bp, Artificial Sequence
  Synthetic
gatgtctgcaggccagatga

SEQ ID NO: 3572 - DNA, 20 bp, Artificial Sequence
  Synthetic
gatgtctgcaggccagatga

SEQ ID NO: 3573 - DNA, 20 bp, Artificial Sequence
  Synthetic
gatgtctgcaggccagatga

SEQ ID NO: 3574 - DNA, 20 bp, Artificial Sequence
  Synthetic
gatgtctgcaggccagatga

SEQ ID NO: 3575 - DNA, 20 bp, Artificial Sequence
  Synthetic
gatgtctgcaggccagatga

SEQ ID NO: 3576 - DNA, 20 bp, Artificial Sequence
  Synthetic
gatgtctgcaggccagatga

SEQ ID NO: 3577 - DNA, 20 bp, Artificial Sequence
  Synthetic
gatgtctgcaggccagatga

SEQ ID NO: 3578 - DNA, 20 bp, Artificial Sequence
  Synthetic
gatgtctgcaggccagatga

SEQ ID NO: 3579 - DNA, 20 bp, Artificial Sequence
  Synthetic
gatgtctgcaggccagatga

SEQ ID NO: 3580 - DNA, 20 bp, Artificial Sequence
  Synthetic
gatgtctgcaggccagatga

SEQ ID NO: 3581 - DNA, 20 bp, Artificial Sequence
  Synthetic
gattcctggtgccagaaaca

SEQ ID NO: 3582 - DNA, 20 bp, Artificial Sequence
  Synthetic
gattcctggtgccagaaaca

SEQ ID NO: 3583 - DNA, 20 bp, Artificial Sequence
  Synthetic
gattcctggtgccagaaaca

SEQ ID NO: 3584 - DNA, 20 bp, Artificial Sequence
  Synthetic
gattcctggtgccagaaaca

SEQ ID NO: 3585 - DNA, 20 bp, Artificial Sequence
  Synthetic
gattcctggtgccagaaaca

SEQ ID NO: 3586 - DNA, 20 bp, Artificial Sequence
  Synthetic
gattcctggtgccagaaaca

SEQ ID NO: 3587 - DNA, 20 bp, Artificial Sequence
  Synthetic
gattcctggtgccagaaaca

SEQ ID NO: 3588 - DNA, 20 bp, Artificial Sequence
  Synthetic
gattcctggtgccagaaaca

SEQ ID NO: 3589 - DNA, 20 bp, Artificial Sequence
  Synthetic
gattcctggtgccagaaaca

SEQ ID NO: 3590 - DNA, 20 bp, Artificial Sequence
  Synthetic
gattcctggtgccagaaaca

SEQ ID NO: 3591 - DNA, 20 bp, Artificial Sequence
  Synthetic
gattcctggtgccagaaaca

SEQ ID NO: 3592 - DNA, 20 bp, Artificial Sequence
  Synthetic
gattcctggtgccagaaaca

SEQ ID NO: 3593 - DNA, 20 bp, Artificial Sequence
  Synthetic
gattcctggtgccagaaaca

SEQ ID NO: 3594 - DNA, 20 bp, Artificial Sequence
  Synthetic
gattcctggtgccagaaaca

SEQ ID NO: 3595 - DNA, 20 bp, Artificial Sequence
  Synthetic
gattcctggtgccagaaaca

SEQ ID NO: 3596 - DNA, 20 bp, Artificial Sequence
  Synthetic
gattcctggtgccagaaaca

SEQ ID NO: 3597 - DNA, 20 bp, Artificial Sequence
  Synthetic
gattcctggtgccagaaaca

SEQ ID NO: 3598 - DNA, 20 bp, Artificial Sequence
  Synthetic
gattcctggtgccagaaaca

SEQ ID NO: 3599 - DNA, 20 bp, Artificial Sequence
  Synthetic
gattcctggtgccagaaaca

SEQ ID NO: 3600 - DNA, 20 bp, Artificial Sequence
  Synthetic
gattcctggtgccagaaaca

SEQ ID NO: 3601 - DNA, 20 bp, Artificial Sequence
  Synthetic
gattcctggtgccagaaaca

SEQ ID NO: 3602 - DNA, 20 bp, Artificial Sequence
  Synthetic
gattcctggtgccagaaaca

SEQ ID NO: 3603 - DNA, 20 bp, Artificial Sequence
  Synthetic
gattcctggtgccagaaaca

SEQ ID NO: 3604 - DNA, 20 bp, Artificial Sequence
  Synthetic
gattcctggtgccagaaaca

SEQ ID NO: 3605 - DNA, 20 bp, Artificial Sequence
  Synthetic
gcattttcaggaggaagcga

SEQ ID NO: 3606 - DNA, 20 bp, Artificial Sequence
  Synthetic
gcattttcaggaggaagcga

SEQ ID NO: 3607 - DNA, 20 bp, Artificial Sequence
  Synthetic
gcattttcaggaggaagcga

SEQ ID NO: 3608 - DNA, 20 bp, Artificial Sequence
  Synthetic
gcattttcaggaggaagcga

SEQ ID NO: 3609 - DNA, 20 bp, Artificial Sequence
  Synthetic
gcattttcaggaggaagcga

SEQ ID NO: 3610 - DNA, 20 bp, Artificial Sequence
  Synthetic
gcattttcaggaggaagcga

SEQ ID NO: 3611 - DNA, 20 bp, Artificial Sequence
  Synthetic
gcattttcaggaggaagcga

SEQ ID NO: 3612 - DNA, 20 bp, Artificial Sequence
  Synthetic
gcattttcaggaggaagcga

SEQ ID NO: 3613 - DNA, 20 bp, Artificial Sequence
  Synthetic
gcattttcaggaggaagcga

SEQ ID NO: 3614 - DNA, 20 bp, Artificial Sequence
  Synthetic
gcattttcaggaggaagcga

SEQ ID NO: 3615 - DNA, 20 bp, Artificial Sequence
  Synthetic
gcattttcaggaggaagcga

SEQ ID NO: 3616 - DNA, 20 bp, Artificial Sequence
  Synthetic
gcattttcaggaggaagcga

SEQ ID NO: 3617 - DNA, 20 bp, Artificial Sequence
  Synthetic
gcattttcaggaggaagcga

SEQ ID NO: 3618 - DNA, 20 bp, Artificial Sequence
  Synthetic
gcattttcaggaggaagcga

SEQ ID NO: 3619 - DNA, 20 bp, Artificial Sequence
  Synthetic
gcattttcaggaggaagcga

SEQ ID NO: 3620 - DNA, 20 bp, Artificial Sequence
  Synthetic
gcattttcaggaggaagcga

SEQ ID NO: 3621 - DNA, 20 bp, Artificial Sequence
  Synthetic
gcattttcaggaggaagcga

SEQ ID NO: 3622 - DNA, 20 bp, Artificial Sequence
  Synthetic
gcattttcaggaggaagcga

SEQ ID NO: 3623 - DNA, 20 bp, Artificial Sequence
  Synthetic
gcattttcaggaggaagcga

SEQ ID NO: 3624 - DNA, 20 bp, Artificial Sequence
  Synthetic
gcattttcaggaggaagcga

SEQ ID NO: 3625 - DNA, 20 bp, Artificial Sequence
  Synthetic
gcattttcaggaggaagcga

SEQ ID NO: 3626 - DNA, 20 bp, Artificial Sequence
  Synthetic
gcattttcaggaggaagcga

SEQ ID NO: 3627 - DNA, 20 bp, Artificial Sequence
  Synthetic
gcattttcaggaggaagcga

SEQ ID NO: 3628 - DNA, 44 bp, Artificial Sequence
  Synthetic
ccctctgacaatgtgccatctggagcactcatctggcctgcaga

SEQ ID NO: 3629 - DNA, 43 bp, Artificial Sequence
  Synthetic
cctctgacaatgtgccatctggagcactcatctggcctgcaga

SEQ ID NO: 3630 - DNA, 42 bp, Artificial Sequence
  Synthetic
ctctgacaatgtgccatctggagcactcatctggcctgcaga

SEQ ID NO: 3631 - DNA, 41 bp, Artificial Sequence
  Synthetic
tctgacaatgtgccatctggagcactcatctggcctgcaga

SEQ ID NO: 3632 - DNA, 40 bp, Artificial Sequence
  Synthetic
ctgacaatgtgccatctggagcactcatctggcctgcaga

SEQ ID NO: 3633 - DNA, 39 bp, Artificial Sequence
  Synthetic
tgacaatgtgccatctggagcactcatctggcctgcaga

SEQ ID NO: 3634 - DNA, 38 bp, Artificial Sequence
  Synthetic
gacaatgtgccatctggagcactcatctggcctgcaga

SEQ ID NO: 3635 - DNA, 37 bp, Artificial Sequence
  Synthetic
acaatgtgccatctggagcactcatctggcctgcaga

SEQ ID NO: 3636 - DNA, 36 bp, Artificial Sequence
  Synthetic
caatgtgccatctggagcactcatctggcctgcaga

SEQ ID NO: 3637 - DNA, 35 bp, Artificial Sequence; identical to SEQ ID NO: 3394
  Synthetic

SEQ ID NO: 3638 - DNA, 34 bp, Artificial Sequence
  Synthetic
atgtgccatctggagcactcatctggcctgcaga

SEQ ID NO: 3639 - DNA, 33 bp, Artificial Sequence
  Synthetic
tgtgccatctggagcactcatctggcctgcaga

SEQ ID NO: 3640 - DNA, 32 bp, Artificial Sequence
  Synthetic
gtgccatctggagcactcatctggcctgcaga

SEQ ID NO: 3641 - DNA, 31 bp, Artificial Sequence
  Synthetic
tgccatctggagcactcatctggcctgcaga

SEQ ID NO: 3642 - DNA, 30 bp, Artificial Sequence
  Synthetic
gccatctggagcactcatctggcctgcaga

SEQ ID NO: 3643 - DNA, 29 bp, Artificial Sequence
  Synthetic
ccatctggagcactcatctggcctgcaga

SEQ ID NO: 3644 - DNA, 28 bp, Artificial Sequence
  Synthetic
catctggagcactcatctggcctgcaga

SEQ ID NO: 3645 - DNA, 27 bp, Artificial Sequence
  Synthetic
atctggagcactcatctggcctgcaga

SEQ ID NO: 3646 - DNA, 26 bp, Artificial Sequence
  Synthetic
tctggagcactcatctggcctgcaga

SEQ ID NO: 3647 - DNA, 25 bp, Artificial Sequence
  Synthetic
ctggagcactcatctggcctgcaga

SEQ ID NO: 3648 - DNA, 24 bp, Artificial Sequence
  Synthetic
tggagcactcatctggcctgcaga

SEQ ID NO: 3649 - DNA, 23 bp, Artificial Sequence
  Synthetic
ggagcactcatctggcctgcaga

SEQ ID NO: 3650 - DNA, 22 bp, Artificial Sequence
  Synthetic
gagcactcatctggcctgcaga

SEQ ID NO: 3651 - DNA, 21 bp, Artificial Sequence
  Synthetic
agcactcatctggcctgcaga

SEQ ID NO: 3652 - DNA, 44 bp, Artificial Sequence
  Synthetic
aggactagttctgccctcccgtcaccactgtttctggcaccagg

SEQ ID NO: 3653 - DNA, 43 bp, Artificial Sequence
  Synthetic
ggactagttctgccctcccgtcaccactgtttctggcaccagg

SEQ ID NO: 3654 - DNA, 42 bp, Artificial Sequence
  Synthetic
gactagttctgccctcccgtcaccactgtttctggcaccagg

SEQ ID NO: 3655 - DNA, 41 bp, Artificial Sequence
  Synthetic
actagttctgccctcccgtcaccactgtttctggcaccagg

SEQ ID NO: 3656 - DNA, 40 bp, Artificial Sequence
  Synthetic
ctagttctgccctcccgtcaccactgtttctggcaccagg

SEQ ID NO: 3657 - DNA, 39 bp, Artificial Sequence
  Synthetic
tagttctgccctcccgtcaccactgtttctggcaccagg

SEQ ID NO: 3658 - DNA, 38 bp, Artificial Sequence
  Synthetic
agttctgccctcccgtcaccactgtttctggcaccagg

SEQ ID NO: 3659 - DNA, 37 bp, Artificial Sequence
  Synthetic
gttctgccctcccgtcaccactgtttctggcaccagg

SEQ ID NO: 3660 - DNA, 36 bp, Artificial Sequence
  Synthetic
ttctgccctcccgtcaccactgtttctggcaccagg

SEQ ID NO: 3661 - DNA, 35 bp, Artificial Sequence
  Synthetic
tctgccctcccgtcaccactgtttctggcaccagg

SEQ ID NO: 3662 - DNA, 34 bp, Artificial Sequence
  Synthetic
ctgccctcccgtcaccactgtttctggcaccagg

SEQ ID NO: 3663 - DNA, 33 bp, Artificial Sequence
  Synthetic
tgccctcccgtcaccactgtttctggcaccagg

SEQ ID NO: 3664 - DNA, 32 bp, Artificial Sequence
  Synthetic
gccctcccgtcaccactgtttctggcaccagg

SEQ ID NO: 3665 - DNA, 31 bp, Artificial Sequence
  Synthetic
ccctcccgtcaccactgtttctggcaccagg

SEQ ID NO: 3666 - DNA, 30 bp, Artificial Sequence
  Synthetic
cctcccgtcaccactgtttctggcaccagg

SEQ ID NO: 3667 - DNA, 29 bp, Artificial Sequence
  Synthetic
ctcccgtcaccactgtttctggcaccagg

SEQ ID NO: 3668 - DNA, 28 bp, Artificial Sequence
  Synthetic
tcccgtcaccactgtttctggcaccagg

SEQ ID NO: 3669 - DNA, 27 bp, Artificial Sequence
  Synthetic
cccgtcaccactgtttctggcaccagg

SEQ ID NO: 3670 - DNA, 26 bp, Artificial Sequence
  Synthetic
ccgtcaccactgtttctggcaccagg

SEQ ID NO: 3671 - DNA, 25 bp, Artificial Sequence
  Synthetic
cgtcaccactgtttctggcaccagg

SEQ ID NO: 3672 - DNA, 24 bp, Artificial Sequence
  Synthetic
gtcaccactgtttctggcaccagg

SEQ ID NO: 3673 - DNA, 23 bp, Artificial Sequence
  Synthetic
tcaccactgtttctggcaccagg

SEQ ID NO: 3674 - DNA, 22 bp, Artificial Sequence
  Synthetic
caccactgtttctggcaccagg

SEQ ID NO: 3675 - DNA, 21 bp, Artificial Sequence
  Synthetic
accactgtttctggcaccagg

SEQ ID NO: 3676 - DNA, 46 bp, Artificial Sequence
  Synthetic
aatgactcaaatatgctgtctgaagcaatcgcttcctcctgaaaat

SEQ ID NO: 3677 - DNA, 45 bp, Artificial Sequence
  Synthetic
atgactcaaatatgctgtctgaagcaatcgcttcctcctgaaaat

SEQ ID NO: 3678 - DNA, 44 bp, Artificial Sequence
  Synthetic
tgactcaaatatgctgtctgaagcaatcgcttcctcctgaaaat

SEQ ID NO: 3679 - DNA, 43 bp, Artificial Sequence
  Synthetic
gactcaaatatgctgtctgaagcaatcgcttcctcctgaaaat

SEQ ID NO: 3680 - DNA, 42 bp, Artificial Sequence
  Synthetic
actcaaatatgctgtctgaagcaatcgcttcctcctgaaaat

SEQ ID NO: 3681 - DNA, 41 bp, Artificial Sequence
  Synthetic
ctcaaatatgctgtctgaagcaatcgcttcctcctgaaaat

SEQ ID NO: 3682 - DNA, 40 bp, Artificial Sequence
  Synthetic
tcaaatatgctgtctgaagcaatcgcttcctcctgaaaat

SEQ ID NO: 3683 - DNA, 39 bp, Artificial Sequence
  Synthetic
caaatatgctgtctgaagcaatcgcttcctcctgaaaat

SEQ ID NO: 3684 - DNA, 38 bp, Artificial Sequence
  Synthetic
aaatatgctgtctgaagcaatcgcttcctcctgaaaat

SEQ ID NO: 3685 - DNA, 37 bp, Artificial Sequence
  Synthetic
aatatgctgtctgaagcaatcgcttcctcctgaaaat

SEQ ID NO: 3686 - DNA, 36 bp, Artificial Sequence
  Synthetic
atatgctgtctgaagcaatcgcttcctcctgaaaat

SEQ ID NO: 3687 - DNA, 35 bp, Artificial Sequence
  Synthetic
tatgctgtctgaagcaatcgcttcctcctgaaaat

SEQ ID NO: 3688 - DNA, 34 bp, Artificial Sequence
  Synthetic
atgctgtctgaagcaatcgcttcctcctgaaaat

SEQ ID NO: 3689 - DNA, 33 bp, Artificial Sequence
  Synthetic
tgctgtctgaagcaatcgcttcctcctgaaaat

SEQ ID NO: 3690 - DNA, 32 bp, Artificial Sequence
  Synthetic
gctgtctgaagcaatcgcttcctcctgaaaat

SEQ ID NO: 3691 - DNA, 31 bp, Artificial Sequence
  Synthetic
ctgtctgaagcaatcgcttcctcctgaaaat

SEQ ID NO: 3692 - DNA, 30 bp, Artificial Sequence; identical to SEQ ID NO: 3385
  Synthetic

SEQ ID NO: 3693 - DNA, 29 bp, Artificial Sequence
  Synthetic
gtctgaagcaatcgcttcctcctgaaaat

SEQ ID NO: 3694 - DNA, 28 bp, Artificial Sequence
  Synthetic
tctgaagcaatcgcttcctcctgaaaat

SEQ ID NO: 3695 - DNA, 27 bp, Artificial Sequence
  Synthetic
ctgaagcaatcgcttcctcctgaaaat

SEQ ID NO: 3696 - DNA, 26 bp, Artificial Sequence
  Synthetic
tgaagcaatcgcttcctcctgaaaat

SEQ ID NO: 3697 - DNA, 25 bp, Artificial Sequence
  Synthetic
gaagcaatcgcttcctcctgaaaat

SEQ ID NO: 3698 - DNA, 24 bp, Artificial Sequence
  Synthetic
aagcaatcgcttcctcctgaaaat

SEQ ID NO: 3699 - DNA, 20 bp, Artificial Sequence
  Synthetic
gtaacggcagacttctccac

SEQ ID NO: 3700 - DNA, 21 bp, Artificial Sequence
  Synthetic
gcatggtgcacctgactcctg

SEQ ID NO: 3701 - DNA, 21 bp, Artificial Sequence
  Synthetic
gcatggtgcacctgactcctg

SEQ ID NO: 3702 - DNA, 21 bp, Artificial Sequence
  Synthetic
gcatggtgcacctgactcctg

SEQ ID NO: 3703 - DNA, 21 bp, Artificial Sequence
  Synthetic
gcatggtgcacctgactcctg

SEQ ID NO: 3704 - DNA, 21 bp, Artificial Sequence
  Synthetic
gcatggtgcacctgactcctg

SEQ ID NO: 3705 - DNA, 21 bp, Artificial Sequence
  Synthetic
gcatggtgcacctgactcctg

SEQ ID NO: 3706 - DNA, 21 bp, Artificial Sequence
  Synthetic
gcatggtgcacctgactcctg

SEQ ID NO: 3707 - DNA, 21 bp, Artificial Sequence
  Synthetic
gcatggtgcacctgactcctg

SEQ ID NO: 3708 - DNA, 21 bp, Artificial Sequence
  Synthetic
gcatggtgcacctgactcctg

SEQ ID NO: 3709 - DNA, 21 bp, Artificial Sequence
  Synthetic
gcatggtgcacctgactcctg

SEQ ID NO: 3710 - DNA, 21 bp, Artificial Sequence
  Synthetic
gcatggtgcacctgactcctg

SEQ ID NO: 3711 - DNA, 21 bp, Artificial Sequence
  Synthetic
gcatggtgcacctgactcctg

SEQ ID NO: 3712 - DNA, 21 bp, Artificial Sequence
  Synthetic
gcatggtgcacctgactcctg

SEQ ID NO: 3713 - DNA, 20 bp, Artificial Sequence
  Synthetic
atccttccagtcagggccat

SEQ ID NO: 3714 - DNA, 20 bp, Artificial Sequence
  Synthetic
atccttccagtcagggccat

SEQ ID NO: 3715 - DNA, 20 bp, Artificial Sequence
  Synthetic
atccttccagtcagggccat

SEQ ID NO: 3716 - DNA, 20 bp, Artificial Sequence
  Synthetic
atccttccagtcagggccat

SEQ ID NO: 3717 - DNA, 20 bp, Artificial Sequence
  Synthetic
atccttccagtcagggccat

SEQ ID NO: 3718 - DNA, 20 bp, Artificial Sequence
  Synthetic
atccttccagtcagggccat

SEQ ID NO: 3719 - DNA, 20 bp, Artificial Sequence
  Synthetic
atccttccagtcagggccat

SEQ ID NO: 3720 - DNA, 20 bp, Artificial Sequence
  Synthetic
atccttccagtcagggccat

SEQ ID NO: 3721 - DNA, 20 bp, Artificial Sequence
  Synthetic
atccttccagtcagggccat

SEQ ID NO: 3722 - DNA, 20 bp, Artificial Sequence
  Synthetic
atccttccagtcagggccat

SEQ ID NO: 3723 - DNA, 20 bp, Artificial Sequence
  Synthetic
atccttccagtcagggccat

SEQ ID NO: 3724 - DNA, 20 bp, Artificial Sequence
  Synthetic
atccttccagtcagggccat

SEQ ID NO: 3725 - DNA, 20 bp, Artificial Sequence
  Synthetic
atccttccagtcagggccat

SEQ ID NO: 3726 - DNA, 20 bp, Artificial Sequence
  Synthetic
atccttccagtcagggccat

SEQ ID NO: 3727 - DNA, 20 bp, Artificial Sequence
  Synthetic
atccttccagtcagggccat

SEQ ID NO: 3728 - DNA, 20 bp, Artificial Sequence
  Synthetic
atccttccagtcagggccat

SEQ ID NO: 3729 - DNA, 20 bp, Artificial Sequence
  Synthetic
atccttccagtcagggccat

SEQ ID NO: 3730 - DNA, 20 bp, Artificial Sequence
  Synthetic
atccttccagtcagggccat

SEQ ID NO: 3731 - DNA, 20 bp, Artificial Sequence
  Synthetic
atccttccagtcagggccat

SEQ ID NO: 3732 - DNA, 20 bp, Artificial Sequence
  Synthetic
atccttccagtcagggccat

SEQ ID NO: 3733 - DNA, 20 bp, Artificial Sequence
  Synthetic
atccttccagtcagggccat

SEQ ID NO: 3734 - DNA, 20 bp, Artificial Sequence
  Synthetic
atccttccagtcagggccat

SEQ ID NO: 3735 - DNA, 20 bp, Artificial Sequence
  Synthetic
atccttccagtcagggccat

SEQ ID NO: 3736 - DNA, 20 bp, Artificial Sequence
  Synthetic
atccttccagtcagggccat

SEQ ID NO: 3737 - DNA, 20 bp, Artificial Sequence
  Synthetic
atccttccagtcagggccat

SEQ ID NO: 3738 - DNA, 20 bp, Artificial Sequence
  Synthetic
atccttccagtcagggccat

SEQ ID NO: 3739 - DNA, 20 bp, Artificial Sequence
  Synthetic
atccttccagtcagggccat

SEQ ID NO: 3740 - DNA, 20 bp, Artificial Sequence
  Synthetic
atccttccagtcagggccat

SEQ ID NO: 3741 - DNA, 20 bp, Artificial Sequence
  Synthetic
atccttccagtcagggccat

SEQ ID NO: 3742 - DNA, 20 bp, Artificial Sequence
  Synthetic
atccttccagtcagggccat

SEQ ID NO: 3743 - DNA, 20 bp, Artificial Sequence
  Synthetic
atccttccagtcagggccat

SEQ ID NO: 3744 - DNA, 20 bp, Artificial Sequence
  Synthetic
atccttccagtcagggccat

SEQ ID NO: 3745 - DNA, 20 bp, Artificial Sequence
  Synthetic
atccttccagtcagggccat

SEQ ID NO: 3746 - DNA, 20 bp, Artificial Sequence
  Synthetic
atccttccagtcagggccat

SEQ ID NO: 3747 - DNA, 20 bp, Artificial Sequence
  Synthetic
atccttccagtcagggccat

SEQ ID NO: 3748 - DNA, 20 bp, Artificial Sequence
  Synthetic
atccttccagtcagggccat

SEQ ID NO: 3749 - DNA, 20 bp, Artificial Sequence
  Synthetic
atccttccagtcagggccat

SEQ ID NO: 3750 - DNA, 20 bp, Artificial Sequence
  Synthetic
atccttccagtcagggccat

SEQ ID NO: 3751 - DNA, 20 bp, Artificial Sequence
  Synthetic
atccttccagtcagggccat

SEQ ID NO: 3752 - DNA, 20 bp, Artificial Sequence
  Synthetic
atccttccagtcagggccat

SEQ ID NO: 3753 - DNA, 20 bp, Artificial Sequence
  Synthetic
atccttccagtcagggccat

SEQ ID NO: 3754 - DNA, 20 bp, Artificial Sequence
  Synthetic
atccttccagtcagggccat

SEQ ID NO: 3755 - DNA, 27 bp, Artificial Sequence
  Synthetic
agacttctcctcaggagtcaggtgcac

SEQ ID NO: 3756 - DNA, 27 bp, Artificial Sequence
  Synthetic
agacttctcttcaggagtcaggtgcac

SEQ ID NO: 3757 - DNA, 34 bp, Artificial Sequence
  Synthetic
taacggcagacttctcctcaggagtcaggtgcac

SEQ ID NO: 3758 - DNA, 32 bp, Artificial Sequence
  Synthetic
acggcagacttctcctcaggagtcaggtgcac

SEQ ID NO: 3759 - DNA, 30 bp, Artificial Sequence
  Synthetic
ggcagacttctcctcaggagtcaggtgcac

SEQ ID NO: 3760 - DNA, 29 bp, Artificial Sequence
  Synthetic
gcagacttctcctcaggagtcaggtgcac

SEQ ID NO: 3761 - DNA, 26 bp, Artificial Sequence
  Synthetic
gacttctcctcaggagtcaggtgcac

SEQ ID NO: 3762 - DNA, 25 bp, Artificial Sequence
  Synthetic
acttctcctcaggagtcaggtgcac

SEQ ID NO: 3763 - DNA, 33 bp, Artificial Sequence
  Synthetic
taacggcagacttctcctcaggagtcaggtgca

SEQ ID NO: 3764 - DNA, 31 bp, Artificial Sequence
  Synthetic
acggcagacttctcctcaggagtcaggtgca

SEQ ID NO: 3765 - DNA, 29 bp, Artificial Sequence
  Synthetic
ggcagacttctcctcaggagtcaggtgca

SEQ ID NO: 3766 - DNA, 28 bp, Artificial Sequence
  Synthetic
gcagacttctcctcaggagtcaggtgca

SEQ ID NO: 3767 - DNA, 25 bp, Artificial Sequence
  Synthetic
gacttctcctcaggagtcaggtgca

SEQ ID NO: 3768 - DNA, 24 bp, Artificial Sequence
  Synthetic
acttctcctcaggagtcaggtgca

SEQ ID NO: 3769 - DNA, 23 bp, Artificial Sequence
  Synthetic
atatcttatggccctgactggaa

SEQ ID NO: 3770 - DNA, 24 bp, Artificial Sequence
  Synthetic
tatatcttatggccctgactggaa

SEQ ID NO: 3771 - DNA, 25 bp, Artificial Sequence
  Synthetic
gtatatcttatggccctgactggaa

SEQ ID NO: 3772 - DNA, 28 bp, Artificial Sequence
  Synthetic
accgtatatcttatggccctgactggaa

SEQ ID NO: 3773 - DNA, 29 bp, Artificial Sequence
  Synthetic
aaccgtatatcttatggccctgactggaa

SEQ ID NO: 3774 - DNA, 30 bp, Artificial Sequence
  Synthetic
gaaccgtatatcttatggccctgactggaa

SEQ ID NO: 3775 - DNA, 31 bp, Artificial Sequence
  Synthetic
tgaaccgtatatcttatggccctgactggaa

SEQ ID NO: 3776 - DNA, 19 bp, Artificial Sequence
  Synthetic
atatcttatggccctgact

SEQ ID NO: 3777 - DNA, 20 bp, Artificial Sequence
  Synthetic
tatatcttatggccctgact

SEQ ID NO: 3778 - DNA, 21 bp, Artificial Sequence
  Synthetic
gtatatcttatggccctgact

SEQ ID NO: 3779 - DNA, 24 bp, Artificial Sequence
  Synthetic
accgtatatcttatggccctgact

SEQ ID NO: 3780 - DNA, 25 bp, Artificial Sequence
  Synthetic
aaccgtatatcttatggccctgact

SEQ ID NO: 3781 - DNA, 26 bp, Artificial Sequence
  Synthetic
gaaccgtatatcttatggccctgact

SEQ ID NO: 3782 - DNA, 27 bp, Artificial Sequence
  Synthetic
tgaaccgtatatcttatggccctgact

SEQ ID NO: 3783 - DNA, 26 bp, Artificial Sequence
  Synthetic
tgaaccgtatatcttatggccctgac

SEQ ID NO: 3784 - DNA, 28 bp, Artificial Sequence
  Synthetic
tgaaccgtatatcttatggccctgactg

SEQ ID NO: 3785 - DNA, 29 bp, Artificial Sequence
  Synthetic
tgaaccgtatatcttatggccctgactgg

SEQ ID NO: 3786 - DNA, 30 bp, Artificial Sequence
  Synthetic
tgaaccgtatatcttatggccctgactgga

SEQ ID NO: 3787 - DNA, 31 bp, Artificial Sequence; identical to SEQ ID NO: 3775
  Synthetic

SEQ ID NO: 3788 - DNA, 32 bp, Artificial Sequence
  Synthetic
tgaaccgtatatcttatggccctgactggaag

SEQ ID NO: 3789 - DNA, 33 bp, Artificial Sequence
  Synthetic
tgaaccgtatatcttatggccctgactggaagg

SEQ ID NO: 3790 - DNA, 30 bp, Artificial Sequence
  Synthetic
acctgaaccgtatatcttatggccctgact

SEQ ID NO: 3791 - DNA, 31 bp, Artificial Sequence
  Synthetic
tacctgaaccgtatatcttatggccctgact

SEQ ID NO: 3792 - DNA, 32 bp, Artificial Sequence; identical to SEQ ID NO: 3533
  Synthetic

SEQ ID NO: 3793 - DNA, 33 bp, Artificial Sequence
  Synthetic
ggtacctgaaccgtatatcttatggccctgact

SEQ ID NO: 3794 - DNA, 34 bp, Artificial Sequence
  Synthetic
tggtacctgaaccgtatatcttatggccctgact

SEQ ID NO: 3795 - DNA, 34 bp, Artificial Sequence
  Synthetic
acctgaaccgtatatcctatggccctgactggaa

SEQ ID NO: 3796 - DNA, 28 bp, Artificial Sequence
  Synthetic
accgtatatcctatggccctgactggaa

SEQ ID NO: 3797 - DNA, 36 bp, Artificial Sequence
  Synthetic
acctgaaccgtatatcctatggccctgactggaagg

SEQ ID NO: 3798 - DNA, 35 bp, Artificial Sequence
  Synthetic
acctgaaccgtatatcctatggccctgactggaag

SEQ ID NO: 3799 - DNA, 33 bp, Artificial Sequence
  Synthetic
acctgaaccgtatatcctatggccctgactgga

SEQ ID NO: 3800 - DNA, 32 bp, Artificial Sequence
  Synthetic
acctgaaccgtatatcctatggccctgactgg

SEQ ID NO: 3801 - DNA, 31 bp, Artificial Sequence; identical to SEQ ID NO: 3532
  Synthetic

SEQ ID NO: 3802 - DNA, 29 bp, Artificial Sequence
  Synthetic
aaccgtatatcctatggccctgactggaa

SEQ ID NO: 3803 - DNA, 31 bp, Artificial Sequence
  Synthetic
tgaaccgtatatcctatggccctgactggaa

SEQ ID NO: 3804 - DNA, 35 bp, Artificial Sequence
  Synthetic
tacctgaaccgtatatcctatggccctgactggaa

SEQ ID NO: 3805 - DNA, 38 bp, Artificial Sequence
  Synthetic
tggtacctgaaccgtatatcctatggccctgactggaa

SEQ ID NO: 3806 - DNA, 36 bp, Artificial Sequence
  Synthetic
gtacctgaaccgtatatcctatggccctgactggaa

SEQ ID NO: 3807 - DNA, 26 bp, Artificial Sequence
  Synthetic
aaccgtatatcctatggccctgactg

SEQ ID NO: 3808 - DNA, 28 bp, Artificial Sequence
  Synthetic
tgaaccgtatatcctatggccctgactg

SEQ ID NO: 3809 - DNA, 32 bp, Artificial Sequence
  Synthetic
tacctgaaccgtatatcctatggccctgactg

SEQ ID NO: 3810 - DNA, 35 bp, Artificial Sequence
  Synthetic
tggtacctgaaccgtatatcctatggccctgactg

SEQ ID NO: 3811 - DNA, 57 bp, Artificial Sequence
  Synthetic
  misc_feature (34)..(37): n is a, c, g, or t
acactctttccctacacgacgctcttccgatctnnnnatgtgggctgcctagaaagg

SEQ ID NO: 3812 - DNA, 49 bp, Artificial Sequence
  Synthetic
tggagttcagacgtgtgctcttccgatctcccagccaaacttgtcaacc

SEQ ID NO: 3813 - DNA, 57 bp, Artificial Sequence
  Synthetic
  misc_feature (34)..(37): n is a, c, g, or t
acactctttccctacacgacgctcttccgatctnnnnacgtctcatatgccccttgg

SEQ ID NO: 3814 - DNA, 51 bp, Artificial Sequence
  Synthetic
tggagttcagacgtgtgctcttccgatctacgtaggaattttggtgggaca

SEQ ID NO: 3815 - DNA, 57 bp, Artificial Sequence
  Synthetic
  misc_feature (34)..(37): n is a, c, g, or t
acactctttccctacacgacgctcttccgatctnnnngaacccaggtagccagagac

SEQ ID NO: 3816 - DNA, 49 bp, Artificial Sequence
  Synthetic
tggagttcagacgtgtgctcttccgatcttcctttcaacccgaacggag

SEQ ID NO: 3817 - DNA, 57 bp, Artificial Sequence
  Synthetic
  misc_feature (34)..(37): n is a, c, g, or t
acactctttccctacacgacgctcttccgatctnnnncagctcagcctgagtgttga

SEQ ID NO: 3818 - DNA, 48 bp, Artificial Sequence
  Synthetic
tggagttcagacgtgtgctcttccgatctctcgtgggtttgtggttgc

SEQ ID NO: 3819 - DNA, 57 bp, Artificial Sequence
  Synthetic
  misc_feature (34)..(37): n is a, c, g, or t
acactctttccctacacgacgctcttccgatctnnnncattgcagagaggcgtatca

SEQ ID NO: 3820 - DNA, 47 bp, Artificial Sequence
  Synthetic
tggagttcagacgtgtgctcttccgatctggggtcccaggtgctgac

SEQ ID NO: 3821 - DNA, 58 bp, Artificial Sequence
  Synthetic
  misc_feature (34)..(37): n is a, c, g, or t
acactctttccctacacgacgctcttccgatctnnnnagggttggccaatctactccc

SEQ ID NO: 3822 - DNA, 51 bp, Artificial Sequence
  Synthetic
tggagttcagacgtgtgctcttccgatctgtcttctctgtctccacatgcc

SEQ ID NO: 3823 - DNA, 57 bp, Artificial Sequence
  Synthetic
  misc_feature (34)..(37): n is a, c, g, or t
acactctttccctacacgacgctcttccgatctnnnngtcagtggaacaagccgagt

SEQ ID NO: 3824 - DNA, 49 bp, Artificial Sequence
  Synthetic
tggagttcagacgtgtgctcttccgatctacttggttggggtaacggtg

SEQ ID NO: 3825 - DNA, 57 bp, Artificial Sequence
  Synthetic
  misc_feature (34)..(37): n is a, c, g, or t
acactctttccctacacgacgctcttccgatctnnnncatacaggtgtggcgagagg

SEQ ID NO: 3826 - DNA, 49 bp, Artificial Sequence
  Synthetic
tggagttcagacgtgtgctcttccgatctccagcctcctttggttagca

SEQ ID NO: 3827 - DNA, 59 bp, Artificial Sequence
  Synthetic
  misc_feature (34)..(37): n is a, c, g, or t
acactctttccctacacgacgctcttccgatctnnnntcacaaacaagacagggaactg

SEQ ID NO: 3828 - DNA, 50 bp, Artificial Sequence
  Synthetic
tggagttcagacgtgtgctcttccgatctagatgtagggctagaggggtg

SEQ ID NO: 3829 - DNA, 59 bp, Artificial Sequence
  Synthetic
  misc_feature (34)..(37): n is a, c, g, or t
acactctttccctacacgacgctcttccgatctnnnnacttggtgccaaattcttctcc

SEQ ID NO: 3830 - DNA, 50 bp, Artificial Sequence
  Synthetic
tggagttcagacgtgtgctcttccgatctaaagagggaatgggctttgga

SEQ ID NO: 3831 - DNA, 58 bp, Artificial Sequence
  Synthetic
  misc_feature (34)..(37): n is a, c, g, or t
acactctttccctacacgacgctcttccgatctnnnncacaacagcttcatgtcagcc

SEQ ID NO: 3832 - DNA, 52 bp, Artificial Sequence
  Synthetic
tggagttcagacgtgtgctcttccgatctacgttaatgtttcctgatggtcc

SEQ ID NO: 3833 - DNA, 57 bp, Artificial Sequence
  Synthetic
  misc_feature (34)..(37): n is a, c, g, or t
acactctttccctacacgacgctcttccgatctnnnntcccctgttgacctggagaa

SEQ ID NO: 3834 - DNA, 49 bp, Artificial Sequence
  Synthetic
tggagttcagacgtgtgctcttccgatctcactgtacttgccctgacca

SEQ ID NO: 3835 - DNA, 57 bp, Artificial Sequence
  Synthetic
  misc_feature (34)..(37): n is a, c, g, or t
acactctttccctacacgacgctcttccgatctnnnnttggtgttgacagggagcaa

SEQ ID NO: 3836 - DNA, 49 bp, Artificial Sequence
  Synthetic
tggagttcagacgtgtgctcttccgatctctgagatgtgggcagaaggg

SEQ ID NO: 3837 - DNA, 57 bp, Artificial Sequence
  Synthetic
  misc_feature (34)..(37): n is a, c, g, or t
acactctttccctacacgacgctcttccgatctnnnntgagagggaacagaagggct

SEQ ID NO: 3838 - DNA, 49 bp, Artificial Sequence
  Synthetic
tggagttcagacgtgtgctcttccgatctgtccaaaggcccaagaacct

SEQ ID NO: 3839 - DNA, 58 bp, Artificial Sequence
  Synthetic
  misc_feature (34)..(37): n is a, c, g, or t
acactctttccctacacgacgctcttccgatctnnnntcctagcactttggaaggtcg

SEQ ID NO: 3840 - DNA, 51 bp, Artificial Sequence
  Synthetic
tggagttcagacgtgtgctcttccgatctgctcatcttaatctgctcagcc

SEQ ID NO: 3841 - DNA, 57 bp, Artificial Sequence
  Synthetic
  misc_feature (34)..(37): n is a, c, g, or t
acactctttccctacacgacgctcttccgatctnnnnggcatggcttctgagactca

SEQ ID NO: 3842 - DNA, 53 bp, Artificial Sequence
  Synthetic
tggagttcagacgtgtgctcttccgatctgtctcccttgcactccctgtcttt

SEQ ID NO: 3843 - DNA, 57 bp, Artificial Sequence
  Synthetic
  misc_feature (34)..(37): n is a, c, g, or t
acactctttccctacacgacgctcttccgatctnnnntttggcaatggaggcattgg

SEQ ID NO: 3844 - DNA, 49 bp, Artificial Sequence
  Synthetic
tggagttcagacgtgtgctcttccgatctgaagaggctgcccatgagag

SEQ ID NO: 3845 - DNA, 57 bp, Artificial Sequence
  Synthetic
  misc_feature (34)..(37): n is a, c, g, or t
acactctttccctacacgacgctcttccgatctnnnnggtctgaggctcgaatcctg

SEQ ID NO: 3846 - DNA, 49 bp, Artificial Sequence
  Synthetic
tggagttcagacgtgtgctcttccgatctctgtggcctccatatccctg

SEQ ID NO: 3847 - DNA, 57 bp, Artificial Sequence
  Synthetic
  misc_feature (34)..(37): n is a, c, g, or t
acactctttccctacacgacgctcttccgatctnnnntttccaccagaactcagccc

SEQ ID NO: 3848 - DNA, 49 bp, Artificial Sequence
  Synthetic
tggagttcagacgtgtgctcttccgatctcctcggttcctccacaacac

SEQ ID NO: 3849 - DNA, 62 bp, Artificial Sequence
  Synthetic
  misc_feature (34)..(37): n is a, c, g, or t
acactctttccctacacgacgctcttccgatctnnnngtggggagatttgcatctgtggagg

SEQ ID NO: 3850 - DNA, 55 bp, Artificial Sequence
  Synthetic
tggagttcagacgtgtgctcttccgatctgcttttataccatcttggggttacag

SEQ ID NO: 3851 - DNA, 61 bp, Artificial Sequence
  Synthetic
  misc_feature (34)..(37): n is a, c, g, or t
acactctttccctacacgacgctcttccgatctnnnncaatgtgcttcaacccatcacggc

SEQ ID NO: 3852 - DNA, 56 bp, Artificial Sequence
  Synthetic
tggagttcagacgtgtgctcttccgatctccatgaatttgtgatggatgcagtctg

SEQ ID NO: 3853 - DNA, 61 bp, Artificial Sequence
  Synthetic
  misc_feature (34)..(37): n is a, c, g, or t
acactctttccctacacgacgctcttccgatctnnnngagaaggaggtgcaggagctagac

SEQ ID NO: 3854 - DNA, 53 bp, Artificial Sequence
  Synthetic
tggagttcagacgtgtgctcttccgatctcatcccgaccttcatccctcctgg

SEQ ID NO: 3855 - DNA, 62 bp, Artificial Sequence
  Synthetic
  misc_feature (34)..(37): n is a, c, g, or t
acactctttccctacacgacgctcttccgatctnnnngtagttctgacattcctcctgaggg

SEQ ID NO: 3856 - DNA, 52 bp, Artificial Sequence
  Synthetic
tggagttcagacgtgtgctcttccgatcttcaaacaaggtgcagatacagca

SEQ ID NO: 3857 - DNA, 59 bp, Artificial Sequence
  Synthetic
  misc_feature (34)..(37): n is a, c, g, or t
acactctttccctacacgacgctcttccgatctnnnngcgggcagtggcgtcttagtcg

SEQ ID NO: 3858 - DNA, 51 bp, Artificial Sequence
  Synthetic
tggagttcagacgtgtgctcttccgatctccctgggtttggttggctgctc

SEQ ID NO: 3859 - DNA, 58 bp, Artificial Sequence
  Synthetic
  misc_feature (34)..(37): n is a, c, g, or t
acactctttccctacacgacgctcttccgatctnnnnctccttgccgcccagccggtc

SEQ ID NO: 3860 - DNA, 52 bp, Artificial Sequence
  Synthetic
tggagttcagacgtgtgctcttccgatctcactggggaagaggcgaggacac

SEQ ID NO: 3861 - DNA, 60 bp, Artificial Sequence
  Synthetic
  misc_feature (34)..(37): n is a, c, g, or t
acactctttccctacacgacgctcttccgatctnnnnccagtgtttcccatccccaacac

SEQ ID NO: 3862 - DNA, 52 bp, Artificial Sequence
  Synthetic
tggagttcagacgtgtgctcttccgatctgaatggatccccccctagagctc

SEQ ID NO: 3863 - DNA, 59 bp, Artificial Sequence
  Synthetic
  misc_feature (34)..(37): n is a, c, g, or t
acactctttccctacacgacgctcttccgatctnnnncaggcccacaggtccttctgga

SEQ ID NO: 3864 - skipped

SEQ ID NO: 3865 - protein, 236 aa, Homo sapiens
MSEAPRAETFVFLDLEATGLPSVEPEIAELSLFAVHRSSLENPEHDESGALVLPRVLDKLTLCMCPERPFTAKASEITGLSSEGLARCRKAGFDGAVVRTLQAFLSRQAGPICLVAHNGFDYDFPLLCAELRRLGARLPRDTVCLDTLPALRGLDRAHSHGTRARGRQGYSLGSLFHRYFRAEPSAAHSAEGDVHTLLLIFLHRAAELLAWADEQARGWAHIEPMYLPPDDPSLEA

SEQ ID NO: 3866 - protein, 236 aa, Mus musculus
MSEPPRAETFVFLDLEATGLPNMDPEIAEISLFAVHRSSLENPERDDSGSLVLPRVLDKLTLCMCPERPFTAKASEITGLSSESLMHCGKAGFNGAVVRTLQGFLSRQEGPICLVAHNGFDYDFPLLCTELQRLGAHLPQDTVCLDTLPALRGLDRAHSHGTRAQGRKSYSLASLFHRYFQAEPSAAHSAEGDVHTLLLIFLHRAPELLAWADEQARSWAHIEPMYVPPDGPSLEA

SEQ ID NO: 3867 - protein, 236 aa, Rattus norvegicus
MSEPLRAETFVFLDLEATGLPNMDPEIAEISLFAVHRSSLENPERDDSGSLVLPRVLDKLTLCMCPERPFTAKASEITGLSSEGLMNCRKAAFNDAVVRTLQGFLSRQEGPICLVAHNGFDYDFPLLCTELQRLGAHLPRDTVCLDTLPALRGLDRVHSHGTRAQGRKSYSLASLFHRYFQAEPSAAHSAEGDVNTLLLIFLHRAPELLAWADEQARSWAHIEPMYVPPDGPSLEA

SEQ ID NO: 3868 - protein, 803 aa, Homo sapiens
MGIQGLLQFIKEASEPIHVRKYKGQVVAVDTYCWLHKGAIACAEKLAKGEPTDRYVGFCMKFVNMLLSHGIKPILVFDGCTLPSKKEVERSRRERRQANLLKGKQLLREGKVSEARECFTRSINITHAMAHKVIKAARSQGVDCLVAPYEADAQLAYLNKAGIVQAIITEDSDLLAFGCKKVILKMDQFGNGLEIDQARLGMCRQLGDVFTEEKFRYMCILSGCDYLSSLRGIGLAKACKVLRLANNPDIVKVIKKIGHYLKMNITVPEDYINGFIRANNTFLYQLVFDPIKRKLIPLNAYEDDVDPETLSYAGQYVDDSIALQIALGNKDINTFEQIDDYNPDTAMPAHSRSHSWDDKTCQKSANVSSIWHRNYSPRPESGTVSDAPQLKENPSTVGVERVISTKGLNLPRKSSIVKRPRSAELSEDDLLSQYSLSFTKKTKKNSSEGNKSLSFSEVFVPDLVNGPTNKKSVSTPPRTRNKFATFLQRKNEESGAVVVPGTRSRFFCSSDSTDCVSNKVSIQPLDETAVTDKENNLHESEYGDQEGKRLVDTDVARNSSDDIPNNHIPGDHIPDKATVFTDEESYSFESSKFTRTISPPTLGTLRSCFSWSGGLGDFSRTPSPSPSTALQQFRRKSDSPTSLPENNMSDVSQLKSEESSDDESHPLREEACSSQSQESGEFSLQSSNASKLSQCSSKDSDSEESDCNIKLLDSQSDQTSKLRLSHFSKKDTPLRNKVPGLYKSSSADSLSTTKIKPLGPARASGLSKKPASIQKRKHHNAENKPGLQIKLNELWKNFGFKKF

SEQ ID NO: 3869 - protein, 846 aa, Homo sapiens
MGIQGLLQFIKEASEPIHVRKYKGQVVAVDTYCWLHKGAIACAEKLAKGEPTDRYVGFCMKFVNMLLSHGIKPILVFDGCTLPSKKEVERSRRERRQANLLKGKQLLREGKVSEARECFTRSINITHAMAHKVIKAARSQGVDCLVAPYEADAQLAYLNKAGIVQAIITEDSDLLAFGCKKVILKMDQFGNGLEIDQARLGMCRQLGDVFTEEKFRYMCILSGCDYLSSLRGIGLAKACKVLRLANNPDIVKVIKKIGHYLKMNITVPEDYINGFIRANNTFLYQLVFDPIKRKLIPLNAYEDDVDPETLSYAGQYVDDSIALQIALGNKDINTFEQIDDYNPDTAMPAHSRSHSWDDKTCQKSANVSSIWHRNYSPRPESGTVSDAPQLKENPSTVGVERVISTKGLNLPRKSSIVKRPRSAELSEDDLLSQYSLSFTKKTKKNSSEGNKSLSFSEVFVPDLVNGPTNKKSVSTPPRTRNKFATFLQRKNEESGAVVVPGTRSRFFCSSDSTDCVSNKVSIQPLDETAVTDKENNLHESEYGDQEGKRLVDTDVARNSSDDIPNNHIPGDHIPDKATVFTDEESYSFESSKFTRTISPPTLGTLRSCFSWSGGLGDFSRTPSPSPSTALQQFRRKSDSPTSLPENNMSDVSQLKSEESSDDESHPLREEACSSQSQESGEFSLQSSNASKLSQCSSKDSDSEESDCNIKLLDSQSDQTSKLRLSHFSKKDTPLRNKVPGLYKSSSADSLSTTKIKPLGPARASGLSKKPASIQKRKHHNAENKPGLQIKLNELWKNFGFKKDSEKLPPCKKPLSPVRDNIQLTPEAEEDIFNKPECGRVQRAIFQ

SEQ ID NO: 3870 - protein, 845 aa, Homo sapiens
MGIQGLLQFIKEASEPIHVRKYKGQVVAVDTYCWLHKGAIACAEKLAKGEPTDRYVGFCMKFVNMLLSHGIKPILVFDGCTLPSKKEVERSRRERRQANLLKGKQLLREGKVSEARECFTRSINITHAMAHKVIKAARSQGVDCLVAPYEADAQLAYLNKAGIVQAIITEDSDLLAFGCKKVILKMDQFGNGLEIDQARLGMCRQLGDVFTEEKFRYMCILSGCDYLSSLRGIGLAKACKVLRLANNPDIVKVIKKIGHYLKMNITVPEDYINGFIRANNTFLYQLVFDPIKRKLIPLNAYEDDVDPETLSYAGQYVDDSIALQIALGNKDINTFEQIDDYNPDTAMPAHSRSHSWDDKTCQKSANVSSIWHRNYSPRPESGTVSDAPQLKENPSTVGVERVISTKGLNLPRKSSIVKRPRSELSEDDLLSQYSLSFTKKTKKNSSEGNKSLSFSEVFVPDLVNGPTNKKSVSTPPRTRNKFATFLQRKNEESGAVVVPGTRSRFFCSSDSTDCVSNKVSIQPLDETAVTDKENNLHESEYGDQEGKRLVDTDVARNSSDDIPNNHIPGDHIPDKATVFTDEESYSFESSKFTRTISPPTLGTLRSCFSWSGGLGDFSRTPSPSPSTALQQFRRKSDSPTSLPENNMSDVSQLKSEESSDDESHPLREEACSSQSQESGEFSLQSSNASKLSQCSSKDSDSEESDCNIKLLDSQSDQTSKLRLSHFSKKDTPLRNKVPGLYKSSSADSLSTTKIKPLGPARASGLSKKPASIQKRKHHNAENKPGLQIKLNELWKNFGFKKDSEKLPPCKKPLSPVRDNIQLTPEAEEDIFNKPECGRVQRAIFQ

SEQ ID NO: 3871 - DNA, 33 bp, Artificial Sequence; identical to SEQ ID NO: 763
  Synthetic

SEQ ID NO: 3872 - protein, 131 aa, Artificial Sequence; identical to SEQ ID NO: 764
  Synthetic
